(19) United States
(12) Patent Application Publication
(10) Pub. No.: US 2024/0115671 A1
(43) Pub. Date: Apr. 11, 2024

(54) INTRACELLULAR DELIVERY OF THERAPEUTIC PROTEINS DESIGNED TO INVADE AND AUTONOMOUSLY LYSE AND METHODS OF USE THEREOF

(71) Applicants: University of Massachusetts, Boston, MA (US); Ernest Pharmaceuticals, Inc., Hadley, MA (US)

(72) Inventors: Neil S. Forbes, Hadley, MA (US); Vishnu Raman, Sunderland, MA (US); Nele Van Dessel, Easthampton, MA (US); Jeanne A. Hardy, Amherst, MA (US)

(21) Appl. No.: 18/276,628

(22) PCT Filed: Feb. 9, 2022
(86) PCT No.: PCT/US2022/070582

§ 371 Date: Aug. 9, 2023

Related U.S. Application Data
(60) Provisional application No. 63/147,506, filed on Feb. 9, 2021.

(51) Int. Cl. A61K 38/48; A61K 35/74; A61K 38/46; C12N 1/20; C12N 1/36; C12N 9/16; C12N 9/64; C12N 15/74

(52) U.S. Cl. CPC A61K 38/4873; A61K 35/74; A61K 38/465; C12N 1/20; C12N 1/36; C12N 9/16; C12N 9/6472; C12N 15/74; C12Y 301/04; C12Y 304/22056; C12N 2800/101; C12N 2830/002

(57) ABSTRACT

Provided herein is a bacterial delivery platform that harnesses mechanisms unique to Salmonella to intracellularly deliver protein-based drugs.

### PRIORITY

[0001] This application claims the benefit of priority of U.S. Provisional Patent Application No. 63/147,506, filed on Feb. 9, 2021, the benefit of priority of which is claimed hereby, and which is incorporated by reference herein in its entirety.

### GOVERNMENT SUPPORT

[0002] This invention was made with government support under grant no. R43 CA233136 awarded by The National Institutes of Health. The government has certain rights in the invention.

### BACKGROUND OF THE INVENTION

[0003] Cancer is generally characterized by an uncontrolled and invasive growth of cells. These cells may spread to other parts of the body (metastasis). Conventional anticancer therapies, consisting of surgical resection, radiotherapy and chemotherapy, can be effective for some cancers/patients; however, they are not effective for many cancer sufferers. Thus, further medical treatments are needed.

[0004] The role of bacteria as an anticancer agent has been recognized for over 100 years, and many genera of bacteria, including Clostridium, Bifidus, and Salmonella, have been shown to preferentially accumulate in tumor tissue and cause regression.

[0005] The use of Salmonella typhimurium to treat solid tumors began with the development of a nonpathogenic strain, VNP20009. Well-tolerated in mice and humans, this strain has been shown to preferentially accumulate (>2000-fold) in tumors over the liver, spleen, lung, heart and skin, retarding tumor growth between 38-79%, and prolonging survival of tumor-bearing mice. In initial clinical trials, S. typhimurium was found to be tolerated at high dose and able to effectively colonize human tumors.

### SUMMARY OF THE INVENTION

[0006] Engineered, non-pathogenic Salmonella selectively colonize tumors one thousand-fold more than any other organ, invade and deliver therapies cytosolically into cancer cells making the bacteria ideal delivery vehicles for cancer therapy. It is herein demonstrated that controlling the activity of flhDC and subsequent flagellar expression in engineered Salmonella enables intracellular protein delivery selectively in tumor cells in vivo and in vitro. The expression of flhDC/flagella is controlled to enable both colonization of tumors and invasion into cancer cells for the purposes of intracellular protein and therapeutic delivery. Flagella are needed for cell invasion into cancer cells in vitro and in vivo. However, flagellar expression of Salmonella in the bloodstream and/or in systemic circulation causes rapid clearance and significantly reduces tumor colonization. As a result, an inducible version of flhDC was genetically engineered into an engineered strain of Salmonella lacking a native version of the transcription factor (alternatively, the endogenous promoter for flhDC can replaced with an inducible promoter). The inducible system allowed for tight expression control of flhDC within the therapeutic strain. Salmonella lacking the ability to express flhDC colonized tumors with greater selectivity than a parental control strain. Inducing expression of flhDC by administration of ‘remote controlling’, with, for example, arabinose in an arabinose inducible system, within intratumoral, engineered Salmonella enabled intracellular invasion and protein delivery into tumor cells.

[0007] Herein is described Salmonella containing and method to control flagellar expression through external means (e.g., a small molecule inducible genetic circuit or inducible expression system) in such a way that engineered strains of Salmonella do not express flagellin systemically. Once the bacteria have colonized tumors to optimal levels, then a ‘remote control’/inducible strategy is employed where a small molecule is used to induce expression of flagella and the type 3 secretion system by activating expression of a recombinant and/or inducible version of the motility regulator, flhDC.

[0008] Another aspect provides for the deletion of the SseJ gene in a Salmonella delivery strain. This gene constricts the location of the Salmonella to the Salmonella-containing vacuole (SCV), increasing the delivery potential of the strain. This can be in combination with/without the previously described control of delivery.

[0009] One aspect provides a bacterial cell comprising: a) inducible expression of flagella; and b) a lysis gene or lysis cassette operably linked to an intracellularly induced Salmonella promoter. In one aspect, the bacterial cell is an intratumoral bacteria cell. In another aspect, the bacterial cell is a Clostridium, Bifidus, E. coli or Salmonella cell. In one aspect, bacterial cell is a Salmonella cell. In one aspect, the lysis cassette is Lysin E from phage phiX174, the lysis cassette of phage iEPS5, or the lysis cassette from lambda phage. In another aspect, intracellularly induced Salmonella promoter is a promoter for one of the genes in Salmonella pathogenicity island 2 type III secretion system (SPI2-T3SS) selected from the group SpiC/SsaB, SseF, SseG, SseI, SseJ, SseK1, SseK2, SifA, SifB, PipB, PipB2, SopD2, GogB, SseL, SteC, SspH1, SspH2, or SirP.

[0010] In one aspect, the cell does not comprise endogenous flhDC expression. In another aspect, the cell comprises an exogenous inducible promoter operably linked to an endogenous or exogenous flhDC gene. In one aspect, the exogenous inducible promoter is operably linked to the endogenous flhDC gene. In another aspect, the exogenous inducible promoter is operably linked the exogenous flhDC gene. In aspect, the exogenous inducible promoter comprises the arabinose inducible promoter PBAD (L-arabinose), LacI (IPTG), salR, or nahR (acetyl salicylic acid (ASA)).

[0011] In one aspect, the bacterial cell comprises a SseJ deletion or wherein expression of SseJ has been reduced.

[0012] One aspect provides a cell comprises a plasmid that expresses a peptide. In one aspect, the peptide is a therapeutic peptide, such as NIPP1 or activated caspase 3.

[0013] One aspect provides a composition comprising a population of cells described herein and a pharmaceutically acceptable carrier.

[0014] Another aspect provides a method to selectively colonize cancer cells, such as a tumor and/or tumor associated cells comprising administering a population of the bacterial cells described herein to a subject in need thereof. In one aspect, the tumor associated cells are tumor cells or intratumoral immune cells, cancer cells or stromal cells within tumors. Another aspect provides a method to treat cancer comprising administering to a subject in need thereof an effective amount of a population of the bacterial cells described herein to treat said cancer. A further aspect provides a method of inhibiting tumor growth/proliferation or reducing the volume/size of a tumor comprising administering to a subject in need thereof an effective amount of a population of the bacterial cells described herein, so as to suppress tumor growth or reduce the volume of the tumor. Another aspect provides a method to treat, reduce formation/number or inhibit spread of metastases comprising administering to subject in need thereof an effective amount of a population of the bacterial cells described herein, so as to treat, reduce formation/number or inhibit spread of metastases. In one aspect, the tumor, tumor associated cells, cancer, or metastases are a lung, liver, kidney, breast, prostate, pancreatic, colon, head and neck, ovarian and/or gastroenterological tumor, tumor associated cells, cancer or metastases. In one aspect, the bacterial cells deliver a therapeutic peptide to said tumor, tumor associated cells, cancer or metastases. In one aspect, the peptide is NIPP1 or activated caspase 3. In one aspect, the cells do not express endogenous flhDC. In another aspect, expression of flhDC in the bacterial cell is under the control of an inducible promoter, wherein the bacterial cells comprise an exogenous inducible promoter controlling expression of endogenous flhDC or the bacterial cells comprise an exogenous inducible promoter operably linked an exogenous flhDC gene. In one aspect, the expression of flhDC is induced after said tumor, tumor associated cells, cancer or metastases have been colonized (e.g., between 1×10⁶ and 1×10¹⁰ CFU/g tumor) by said bacteria.

[0015] One aspect provides a bacterial cell comprising: a) a SseJ deletion or wherein expression of SseJ has been reduced; and b) a lysis gene or lysis cassette operably linked to an intracellularly induced Salmonella promoter. In one aspect, the bacterial cell is an intratumoral bacteria cell. In another aspect, the bacterial cell is a Clostridium, Bifidus or Salmonella cell. In aspect, the bacterial cell is a Salmonella cell. In one aspect, the lysis cassette is Lysin E from phage phiX174, the lysis cassette of phage iEPS5, or the lysis cassette from lambda phage. In another aspect, the intracellularly induced Salmonella promoter is a promoter for one of the genes in Salmonella pathogenicity island 2 type III secretion system (SPI2-T3SS) selected from the group SpiC/SsaB, SseF, SseG, SseI, SseJ, SseK1, SseK2, SifA, SifB, PipB, PipB2, SopD2, GogB, SseI SteC, SspH1, SspH2, or SirP.

[0016] In one aspect, the cell of any one of claims 28-33, wherein the cell does not comprise endogenous flhDC expression. In another aspect, the cell comprises an exogenous inducible promoter operably linked to an endogenous or exogenous flhDC gene. In another aspect, the exogenous inducible promoter is operably linked to the endogenous flhDC gene. In another aspect, the exogenous inducible promoter is operably linked the exogenous flhDC gene. In aspect, the exogenous inducible promoter comprises the arabinose inducible promoter PBAD (L-arabinose), LacI (IPTG), nahR (acetyl salicylic acid (ASA)), or salR acetyl salicylic acid (ASA).

[0017] In one aspect, the bacterial cell comprises a plasmid that expresses a peptide. In one aspect, the peptide is a therapeutic peptide, such as NIPP1 or activated caspase 3.

[0018] One aspect provides for a composition comprising a population of cells as described herein and a pharmaceutically acceptable carrier.

[0019] One aspect provides a method to colonize a tumor and/or tumor associated cells comprising administering a population of the bacterial cells described herein to a subject in need thereof. In one aspect, the tumor associated cells are tumor cells, intratumoral immune cells or stromal cells within tumors. In one aspect there is provided a method to treat cancer comprising administering to subject in need thereof an effective amount of a population of the bacterial cells described herein so as to treat said cancer. Another aspect provides a method of inhibiting tumor growth/proliferation or reducing the volume/size of a tumor comprising administering to subject in need thereof an effective amount of a population of the bacterial cells described herein, so as to suppress tumor growth or reduce the volume of the tumor. A further aspect provides a method to treat, reduce formation/number or inhibit spread of metastases comprising administering to subject in need thereof an effective amount of a population of the bacterial cells described herein, so as to treat, reduce formation/number or inhibit spread of metastases. In one aspect, the tumor, tumor associated cells, cancer, or metastases are a lung, liver, kidney, breast, prostate, pancreatic, colon, head and neck, ovarian and/or gastroenterological tumor, tumor associated cells, cancer or metastases. In another aspect, the bacterial cells deliver a therapeutic peptide, such as NIPP1 or activated caspase 3, to said tumor, tumor associated cells, cancer or metastases. In one embodiment, endogenous expression of flhDC is under control of an exogenous inducible promoter. In another aspect, expression of flhDC is under the control of an inducible promoter, wherein the bacterial cells comprise an exogenous inducible promoter operably linked an exogenous flhDC gene. In a further aspect, the expression of flhDC is induced after said tumor, tumor associated cells, cancer or metastases have been colonized by said bacteria.

[0020] One aspect provides a bacterial cell comprising: a) constitutive or inducible expression of a therapeutic peptide, wherein the therapeutic peptide is activated caspase-3 and wherein said activated caspase-3 is expressed as an activated protein without further processing; and b) a lysis gene or lysis cassette operably linked to an intracellularly induced Salmonella promoter. In one aspect, the bacterial cell is an intratumoral bacteria cell. In one aspect, the bacterial cell is a Clostridium, Bifidus or Salmonella cell. In another aspect, the bacterial cell is a Salmonella cell. In one aspect, the lysis cassette is Lysin E from phage phiX174, the lysis cassette of phage iEPS5, or the lysis cassette from lambda phage. In one aspect, the intracellularly induced Salmonella promoter is a promoter for one of the genes in Salmonella pathogenicity island 2 type III secretion system (SPI2-T3SS) selected from the group SpiC/SsaB, SseF, SseG, SseI, SseJ, SseK1, SseK2, SifA, SifB, PipB, PipB2, SopD2, GogB, SseL, SteC, SspH1, SspH2, or SirP.

[0021] In another aspect, the bacterial cell does not comprise endogenous flhDC expression. In one aspect, the bacterial cell comprises an exogenous inducible promoter operably linked to an endogenous or exogenous flhDC gene. In one aspect, the exogenous inducible promoter is operably linked to the endogenous flhDC gene. In another aspect, the exogenous inducible promoter is operably linked the exogenous flhDC gene. In one aspect, the exogenous inducible promoter comprises the arabinose inducible promoter PBAD (L-arabinose), LacI (IPTG), nahR (acetyl salicylic acid (ASA)) or salR acetyl salicylic acid (ASA).

[0022] In aspect, the bacterial cell comprises a SseJ deletion or wherein expression of SseJ has been reduced.

[0023] One aspect provides for cells that express at least one additional exogenous therapeutic peptide, such as NIPP1.

[0024] Another aspect provides a composition comprising a population of cells described herein and a pharmaceutically acceptable carrier.

[0025] One aspect provides a method to colonize a tumor and/or tumor associated cells comprising administering a population of the bacterial cells described herein to a subject in need thereof. In one aspect, the tumor associated cells are tumor cells, intratumoral immune cells or stromal cells within tumors. One aspect provides a method to treat cancer comprising administering to subject in need thereof an effective amount of a population of the bacterial cells described herein so as to treat said cancer. In one aspect there is provided a method of inhibiting tumor growth/proliferation or reducing the volume/size of a tumor comprising administering to subject in need thereof an effective amount of a population of the bacterial cells of any one of claims described herein, so as to suppress tumor growth or reduce the volume of the tumor. One aspect provides a method to treat, reduce formation/number or inhibit spread of metastases comprising administering to subject in need thereof an effective amount of a population of the bacterial cells described herein, so as to treat, reduce formation/number or inhibit spread of metastases. In one aspect, the tumor, tumor associated cells, cancer, or metastases are a lung, liver, kidney, breast, prostate, pancreatic, colon, head and neck, ovarian and/or gastroenterological tumor, tumor associated cells, cancer or metastases. In one aspect, the bacterial cells deliver said caspase to said tumor, tumor associated cells, cancer or metastases. In another aspect, the bacterial cells deliver at least one additional exogenous therapeutic peptide, such as NIPP1. In aspect, the endogenous expression of flhDC is under control of an exogenous inducible promoter. In another aspect, the expression of flhDC is under the control of an inducible promoter, wherein the bacterial cells comprise an exogenous inducible promoter operably linked an exogenous flhDC gene. In one aspect, the bacterial cells do not express endogenous flhDC. In one aspect, the expression of flhDC is induced after said tumor, tumor associated cells, cancer or metastases have been colonized by said bacteria.

### BRIEF DESCRIPTION OF THE DRAWINGS

[0026] The novel features of the invention are set forth with particularity in the appended claims. A better understanding of the features and advantages of the present invention will be obtained by reference to the following detailed description that sets forth illustrative embodiments, in which the principles of the invention are utilized, and the accompanying drawings of which:

[0027] FIGS. 1A-G: Intracellular lifestyle of Salmonella is controlled by flhDC. A) The design goals were to genetically engineer a bacterial vehicle that (1) synthesizes (makes) a protein drug (yellow/purple), (2) actively invades into cancer cells and (3) releases the drug. With time, drugs escape Salmonella vacuoles (SCVs, red). B) Salmonella (light blue, arrows) invade cancer cells (red). C) Seventy percent of Salmonella (red; white arrow) were intracellular (co-localized red and green; black arrows) within tumors in vivo (***, P<0.001). D) In tumors in mice, Salmonella invaded multiple cell types, including immune, carcinoma (epithelial) and other associated (stromal) cells. E) In cancer cells in monolayer, flhDC re-expression (flhDC+) increased invasion (black arrows) compared non-expressing controls (flhDC−; ***, P<0.001). F) In a three-dimensional tumor-on-a-chip, flhDC+Salmonella, with a green intracellular reporter, invaded more than flhDC− controls (**, P<0.01). G) After administration to tumor-bearing mice, re-expression of flhDC increased invasion into cancerous and immune cells (*, P<0.05).

[0028] FIGS. 2A-J. Design of ID Salmonella to release protein into cells. A) Salmonella with either the PsifA-GFP or PsseJ-GFP reporter constructs expressed GFP after invasion (white arrows). Extracellular expression (black arrows) from PsseJ-GFP was less than PsifA-GFP (***, P<0.001). The intracellular activity of the PsseJ promoter was four times greater than extracellular activity (***, P<0.001). B) Induction of PBAD-LysE at 96 h (arrow) induced bacteria lysis at a rate of 0.39 hr⁻¹. C) When administered to MCF7 cancer cells, 68% of intracellular Salmonella with PsseJ-lysE lysed, significantly more than PsseJ-GFP controls (***, P<0.001). C) Salmonella with PsseJ-lysE and Plac-GFP delivered GFP into the cellular cytoplasm. Only released, and not intra-bacterial, GFP was stained. E) Intracellular ID Salmonella lysed at a rate of 0.33 hr⁻¹ (half-life=2.1 h). F) In liquid culture, PBAD-lysE and PsseJ-lysE Salmonella grew at similar rates as non-transformed controls (white bars). When intracellular, PsseJ-lysE Salmonella, lysed at a similar rate as induced PBAD-lysE Salmonella in culture (black bars). G) Bacterial EGFP production per colony forming unit (CFU). H) After invasion and before lysis, Salmonella (light blue, white arrow) were in LAMP1-stained SCVs (red, yellow arrows). After lysis, GFP (green, black arrow) remained within the membranes of SCVs. From 6 to 24 h after invasion, the percentage of released GFP in the cytosol, and not SCVs, increased from 25% to 75% (***, P<0.001). I) In phalloidin-stained cancer cells (red) released GFP (green, black arrows) moved from SCVs near the nucleus (blue) to throughout the cytoplasm. J) ID Salmonella (left) lyse and GFP diffuses through the cytosol of a cancer cells (right). Temporal profiles of GFP intensity, centered on the lysed bacteria.

[0029] FIGS. 3A-G. PsseJ and flhDC are components of ID Salmonella delivery to tumors. A) Most released GFP (green, black arrow) originated from lysed Salmonella in LAMP1-stained SCVs (red, yellow arrow). Cytosolic bacteria (light blue, white arrow) did not lyse (***, P<0.001) or release GFP. Only released GFP was stained. B) Predominantly cytoplasmic ΔsifA remained intact (red, white arrows) and had less lysis (green, black arrows) than predominantly vacuolar ΔsseJ and ID Salmonella (***<P<0.001). C) GFP (green, arrows) was only delivered when Salmonella was transformed with both PBAD-flhDC and PsseJ-LysE (***, P<0.001). D) After injection of 2×10⁶ bacteria/mouse to BALB/c mice with 4T1 tumors, ID Salmonella delivered GFP into cancer cells (arrows). E) Delivered GFP was present in extracts from tumors (T), but not livers (L) or spleens (S). F) Administration of ID Salmonella with induced PBAD-flhDC to BALB/c mice with 4T1 tumors delivered GFP (arrows) to more cells than flhDC− controls (***, P<0.001). G) Luciferase-expressing ID Salmonella were intravenously injected into BALB/c mice with 4T1 tumors and bacterial density in tumors was measured for 14 days with bioluminescence imaging.

[0030] FIGS. 4A-E. Efficacy of ID Salmonella. A) Anti-actin nanobody (NB) and GFP (Ctr) was delivered into 4T1 cancer cells with ID Salmonella. Beta-actin was immuno-precipitated with delivered nanobody and was enriched 2.5 times compared to controls. B) ID Salmonella delivery of NIPP1-CD and CT Casp-3 caused more death (red, white arrows) in Hepa 1-6 cells compared to controls (***, P<0.001, top). Cells invaded with control Salmonella (green, black arrows) or not invaded (yellow arrows) did not die. C) Delivery of NIPP1-CD and CT Casp 3 caused cell death (red) in microfluidic tumor masses (*, P<0.05; **, P<0.01). Death increased with time as Salmonella invaded into cells and delivered protein (*, P<0.05). D) Delivery of CT Casp-3 decreased growth of 4T1 mammary tumors compared to bacterial controls that delivered GFP (*, P<0.05; n=3). E) Nineteen days after injection, the volume of CT-Casp-3-treated Hepa 1-6 liver tumors were 12% of controls (***, P<0.001; n=3; left). Treatment with CT Casp-3 reduced tumor growth rate compared to Salmonella controls (P<0.05, middle), significantly increased survival (P<0.05, right) and cured one mouse.

[0031] FIGS. 5A-D. Tumor selectivity of ΔflhD and ΔsifA Salmonella. A) Tumor colonization of ΔflhD Salmonella was unchanged as compared to the parental control. However, liver colonization of ΔflhD Salmonella was ten-fold less than control (*, P<0.05). B) Although not statistically significant, the colonization levels of all three flhDC overexpressing tumors were less than those of the parental control (P=0.34). C) The aflagellate, flhDC expressing ΔfliGHI Salmonella colonized the livers eight-fold and twelve-fold more than ΔflhD and ΔfliGHI+ΔflhD strains, respectively (*, P<0.05) D) ΔfliGHI, ΔflhD, ΔfliGHI+ΔflhD Salmonella did not differ in tumor colonization levels.

[0032] FIGS. 6A-I. flhDC activity is needed for increased bacterial dispersion in tumors. A) Mice bearing 4T1 tumors were injected with ΔflhD Salmonella. 48 hours after bacterial injection, half of the mice were administered with arabinose 48 and 72 hours after bacterial injection in order to induce flhDC expression. B)flhDC uninduced Salmonella were non-motile and formed distinctly separated colonies either in necrotic (yellow arrows) or viable tissue (green arrows). C) 75% of distinct colonies resided in necrosis while only 25% of colonies were located in viable tumor tissue (**, P<0.01). D) The growth rate of bacteria in necrosis (0.12 hr-1) was marginally higher than those in viable tumor (0.11 hr-1) tissue (*, P<0.05) which corresponded to doubling times of (E) 6 hours in necrosis versus 6.5 hours in viable tumor tissue (*, P<0.05). F) Dense bacterial colony sizes (red borders) were visibly larger with flhDC induced as compared to uninduced tumors. Scale bar is um. G) Dense colony sizes were 50% larger within tumors treated with flhDC induced as opposed to uninduced tumors (*, P<0.05). H) The abundance of satellite colonies (green arrows) outside of main dense bacterial colonies was visually greater in tumors containing flhDC induced as opposed to uninduced Salmonella. Scale bar is 200 um. I) There was a two-fold greater abundance of isolated satellite colonies in tumors containing flhDC induced as opposed to uninduced Salmonella (*, P<0.05).

[0033] FIGS. 7A-I. flhDC activity increases the dispersion of intracellular Salmonella within tumors in vitro and in vivo. A) A microfluidic tumor-on-a-chip was infected with either flhDC induced or uninduced IR Salmonella. These bacteria expressed GFP selectively inside cells. B) flhDC induced Salmonella (green) were distributed throughout tumor masses while uninduced bacteria were faintly detectable towards the front edge of the tumor mass (white arrows). Scale bar is 100 um. C) The amount of intracellular bacteria was 50-fold to 75-fold greater for x>0.5 in tumors with flhDC induced as opposed to uninduced Salmonella (**, P<0.01; ***, P<0.001). D) The amount of flhDC induced, intracellular bacteria continued to increase over time as compared to the uninduced control (*, P<0.05; **, P<0.01; ***, P<0.001). E) Mice were infected with IR Salmonella and one group was administered with arabinose to express flhDC. F) Dense uninduced Salmonella contained significantly less intracellular bacteria (yellow arrows) as compared with induced colonies (yellow borders). G) The fraction of intracellular flhDC induced Salmonella was three-fold greater than uninduced colonies within tumors (*, P<0.05). H) The dispersion of intracellular bacteria in tumors was greater after flhDC induction. Euclidean distance mapping of intracellular bacteria showed that tumor coverage was (I) 50% greater when flhDC was expressed (*, P<0.05).

[0034] FIGS. 8A-B. flhDC expression was needed for intracellular protein delivery into broadly distributed cells within tumors in vivo. A) When flhDC was induced, Intracellular delivery occurred in spatially more distributed cells within tumors (white arrows). Euclidean distance mapping demonstrated that tumors treated with flhDC induced Salmonella had cells with GFP delivery that were (B) 60% more spatially distributed within tumors as compared to the uninduced control (*, P<0.05).

[0035] FIGS. 9A-D. Engineered Salmonella are more effective for intracellular delivery than cytosolic Salmonella. A) The ΔsifA Salmonella colonized tumors ten-fold less than the parental control strain (*, P<0.05). B) The ΔsifA Salmonella colonized the liver 15-fold less than the parental control strain (*, P<0.05). C) Cytosolic ΔsifA Salmonella remained almost exclusively intact (red) within cancer cells while the majority of FID Sal lysed within cancer cells (green dots FID Sal panel). D) FID Sal lysed at least 18-fold more than ΔsifA Salmonella at any point in time (***, P<0.001).

[0036] FIGS. 10A-J. flhDC activity decreases activity by enabling vacuolar escape of Salmonella. A) 4T1 cells in monolayer were infected with either ID Sal or FID Sal. B) While overall bacterial invasion was greater for FID Sal treated cells (green and red dots), Bacterial lysis (green) decreased, and more FID Sal remained intact (red) after cancer cell infection as compared to ID Sal. D) While 60% of the control ID Sal lysed, only 40% of FID Sal lysed (**, P<0.01). E) 4T1 cells were infected with either control or flhDC expressing Salmonella. F) Control Salmonella were predominantly in vacuoles (red circle). However, a greater number of flhDC induced Salmonella resided in the cytosol (white circle). G) 90% of control Salmonella resided within vacuoles inside cancer cells as compared to 70% of flhDC induced bacteria (**, P<0.01). H) ID Sal were more likely to lyse intracellularly because the bacteria remained in vacuoles (White arrows). I) Although a significant fraction of FID Sal lysed inside cells (White arrows), a small but significant proportion of the bacteria evaded intracellular vacuoles and thus, did not lyse (Turquoise arrows). J) The presence of significant amounts of cytosolic, unlysed FID Sal was observed in vivo (white arrows).

[0037] FIGS. 11A-D. Overexpression of flhDC in Salmonella with impaired vacuole escape abilities maintains high cell invasion and rescues lysis efficiency. A) 4T1 cells infected with ID Sal had lower invasion but intracellularly lysed (green dots) with high efficiency. More FID Sal invaded 4T1 cancer cells but had lower lysis efficiency (green dots). The ΔsseJ FID Sal invaded 4T1 cancer cells and lysed intracellularly with high efficiency (red and green dots). B) ΔsseJ FID Sal invaded cancer cells three-fold more than ID Sal controls (**, P<0.01). C) ΔsseJ FID Sal lysed with 20% greater efficiency than ID Sal and (D) delivered 2.5 and 2 times more protein intracellularly than ID Sal or FID Sal, respectively (**, P<0.01).

[0038] FIG. 12. Modulating flhDC expression increases tumor selectivity and intracellular delivery distribution of engineered Salmonella. Salmonella lacking flhDC expression colonized tumors more selectively than strains without controlled flhDC expression. In tumors, flhDC expression enabled Salmonella to disperse and invade tumor cells. Expressing flhDC within an engineered, ΔsseJ strain enabled vacuolar retention of the Salmonella and lead to higher lysis efficiency and overall protein delivery within tumor cells.

[0039] FIGS. 13A-B. Genomic integration of inducible flhDC invades cancer cells as well as the parental and plasmid based inducible flhDC systems. A) After arabinose induction of both episomal and chromosomally integrated flhDC systems, Salmonella invaded (green dots) cancer cells (red) equally as well as the parental strain. B) The uninduced knock in strain was equally as noninvasive as the uninduced, plasmid-based system. After induction, EBV-002 with chromosomally integrated flhDC gene circuit was more invasive than either the uninduced plasmid based or genomically knocked in strain (*, P<0.05).

[0040] FIGS. 14A-B. Tuning flhD expression in EBV-002 with salicylic acid. A) EBV-002 was transformed with flhD constructs that were inducible with salicylic acid. The flhD gene was C-terminally tagged with either a low, medium or highly active degradation tag to suppress flhD activity in the uninduced state. As expected, none of the three strains invaded cancer cells without salicylic acid induction. However, after induction, only EBV-002 transformed with flhD containing low or moderate degradation tags invaded a large number of cells (green dots). EBV-002 containing flhD with a highly active degradation tag was only weakly invasive after induction. B) PBAD induction of flhD only increased intracellular invasion of EBV-002 two-fold compared to the uninduced control. EBV-002 invaded a significant number of cells without a degradation tag to suppress flhD activity in the uninduced state. However, salicylic induced samples (2) and (3) invaded cells approximately 30-fold more than the uninduced controls. EBV-002 containing a highly active degradation tag on flhD (sample 4) only invaded cancer cells five-fold more than the uninduced control. Induction of samples (2), (3) and (4) were all statistically significant at P<0.01.

[0041] FIGS. 15A-D. Clinical EBV-002 is triggered by aspirin to swim and invade cancer cells. EBV-002, which has a genomic deletion of flhD, was genetically engineered to express flhDC with a salicylic acid responsive genetic circuit. A) Without salicylic acid, the bacteria remained non-motile. After inducing the bacteria with salicylic acid, all bacteria were highly motile as shown by the paths of the bacteria (uninduced, blue; induced, red). B) Salicylic acid induced EBV-002 were 12.7 times more motile than the uninduced bacteria (***, P<0.001). C) Aspirin induction of flhDC robustly controlled cancer cell invasion of EBV-002. Aspirin Induced EBV-002 (green) invaded almost every cancer cell (white arrows). D) Aspirin induced EBV-002 invaded cancer cells 30-fold more than uninduced EBV-002 (***, P<0.001).

[0042] FIGS. 16A-B. Determination of the lowest amount of salicyclic acid needed to induce cell invasion of EBV-002. A) Concentrations above 500 nM salicylic acid induced microscopically visible amounts of intracellular EBV-002. B) A minimum of 500 nM of salicylic acid was sufficient to induce high levels of cell invasion (**, P<0.01).

[0043] FIGS. 17A-B. Biodistribution and protein delivery of EBV-003 and EBV-001. A) While EBV-003 colonization remained unchanged in the liver and spleen as compared to EBV-001, the EBV-003 strain colonized tumors 10.7-fold more than the first-generation strain (**, P<0.01). B) EBV-003 delivered 31 times more protein into tumors compared to EBV-001. Similar to EBV-001, EBV-003 did not deliver detectable quantities of protein into either the liver or spleen.

[0044] FIGS. 18A-C. Induction of flhD with salicylate increases penetration and intracellular invasion of EBV-003 within viable tumor tissue. A) Tumors containing uninduced (left) and induced (right) EBV-003. More bacteria (red Xs) were present intracellularly within or immediately adjacent to actively dividing tumor cells (solid red outline) in the induced as compared to the uninduced sample. B) Close histological examination revealed that uninduced EBV-003 residing near actively dividing tumor tissue did not penetrate into the tissue whereas, induction of flhD in EBV-003 significantly increased the presence of intracellular bacteria in actively dividing tumor cells (white arrows). C) There was a three-fold enrichment of EBV-003 invaded cancer cells in the flhD induced EBV-003 bacteria as compared to the uninduced sample (*, P<0.05).

[0045] FIGS. 19A-B. Intracellular protein delivery of EBV-003 within breast tumors. A) Induced EBV-003 delivered protein intracellularly into cells within actively dividing regions of tumors (white arrows). B) Intracellular protein delivery was only detected in one out of four mice with uninduced EBV-003. However, protein delivery was detected in five out of six mice with salicylate induced EBV-003.

[0046] FIGS. 20A-C. Colonization selectivity of EBV-003 in liver metastases of breast cancer versus healthy liver tissue. A) Aside from a small metastatic lesion the healthy liver tissue (left) contained a very limited number of EBV-003 colonies. On the other hand, a liver with several large metastatic lesions (right) was heavily colonized by EBV-003 (denoted with solid white boundaries). 85% of these colonies were within or immediately adjacent to actively dividing tumor cells indicated by the presence of dense blue nuclei (red arrows). B) On closer examination, the few colonies that were present in healthy liver tissue (1) were insignificantly small as compared to the bacteria within the metastatic lesions (2) indicating that on top of preferentially colonizing metastases, EBV-003 colonies grow orders of magnitude more within metastatic tissue as compared to healthy liver tissue (The red arrow pointing right indicates the portion of the liver with the metastatic lesion. The green arrow pointing left indicates the side of healthy liver tissue. The red line denotes the boundary between the two). C) The colony size of EBV-003 within metastatic lesions was 118-fold greater than the colony size within healthy liver tissue indicating the ability of the bacteria to grow orders of magnitude only within the tumor tissue (***, P=2.2×10⁻²⁶) FIGS. 21A-B. Intracellular Invasion of EBV-003 within spontaneous liver metastasis of EBV-003. A) A significant number of both flhDC uninduced and induced EBV-003 intracellularly invaded (white arrows) metastatic cancer cells within the liver. B) 87% and 83% of uninduced and induced EBV-003, respectively, intracellularly invaded or were immediately adjacent to cancer cells within metastatic lesions.

[0047] FIGS. 22A-B. Intracellular protein delivery of EBV-003 within metastatic breast cancer in the liver. A) EBV-003 (green) delivered protein (red) into metastatic breast cancer cells within the liver (white arrow). B) The flhDC induced EBV-003 delivered protein into metastatic tumor cells at a three-fold higher frequency as compared to uninduced EBV-003.

### DETAILED DESCRIPTION OF THE INVENTION

[0048] The majority of proteins are intracellular. Specifically targeting intracellular pathways specifically in cancer cells using macromolecular therapies increases the potential treatment options for any patient. However, macromolecular therapies that target intracellular pathways face significant barriers associated with tumor targeting, distribution, internalization and endosomal release. Engineered, non-pathogenic Salmonella selectively colonize tumors one thousand-fold more than any other organ, invade and deliver therapies cytosolically into cancer cells making the bacteria ideal delivery vehicles for cancer therapy.

[0049] However, a problem with using bacteria as an anti-cancer agent is their toxicity at the dose required for therapeutic efficacy and an obstacle in cancer gene therapy is the specific targeting of therapy directly to the cancer. Another issue to be addressed is systemic clearance of Salmonella. A further issue is the activity of cytosolic Salmonella (as compared to SCV Salmonella). A novel therapeutic platform for controlled colonization and/or invasion of engineered Salmonella in cancer cells and controlled gene and protein delivery in cancer cells, and therefore treatment for cancer, is provided herein.

[0050] To address these challenges, a bacterial delivery platform was developed that harnesses mechanisms unique to Salmonella to intracellularly deliver protein-based drugs. Salmonella sense the intracellular environment and accumulate inside cells when in tumors. Genetic circuits were engineered that force entry into cancer cells and release proteins from the endosome into the cytoplasm. Intracellular lysis makes the platform self-limiting and reduces the possibility of unwanted infection. Delivered nanobodies and protein interactors (NIPP1) bind to their targets and cause cell death. Delivery of caspase-3 to mice reduces growth of breast tumors and eliminates liver tumors. Intracellular delivery of protein-based drugs to tumors opens up the entire proteome for treatment.

### Definitions

[0051] Unless defined otherwise, all technical and scientific terms used herein have the same meaning as commonly understood by one of ordinary skill in the art to which this invention belongs. Although any methods and materials similar or equivalent to those described herein can be used in the practice or testing of the present invention, several embodiments with regards to methods and materials are described herein. As used herein, each of the following terms has the meaning associated with it in this section.

[0052] For the purposes of clarity and a concise description, features can be described herein as part of the same or separate embodiments; however, it will be appreciated that the scope of the invention may include embodiments having combinations of all or some of the features described.

[0053] References in the specification to “one embodiment”, “an embodiment”, etc., indicate that the embodiment described may include a particular aspect, feature, structure, moiety, or characteristic, but not every embodiment necessarily includes that aspect, feature, structure, moiety, or characteristic. Moreover, such phrases may, but do not necessarily, refer to the same embodiment referred to in other portions of the specification. Further, when a particular aspect, feature, structure, moiety, or characteristic is described in connection with an embodiment, it is within the knowledge of one skilled in the art to affect or connect such aspect, feature, structure, moiety, or characteristic with other embodiments, whether or not explicitly described.

[0054] As used herein, the indefinite articles “a”, “an” and “the” should be understood to include plural reference unless the context clearly indicates otherwise.

[0055] The phrase “and/or,” as used herein, should be understood to mean “either or both” of the elements so conjoined, e.g., elements that are conjunctively present in some cases and disjunctively present in other cases.

[0056] As used herein, “or” should be understood to have the same meaning as “and/or” as defined above. For example, when separating a listing of items, “and/or” or “or” shall be interpreted as being inclusive, e.g., the inclusion of at least one, but also including more than one, of a number of items, and, optionally, additional unlisted items. Only terms clearly indicated to the contrary, such as “only one of” or “exactly one of,” or, when used in the claims, “consisting of,” will refer to the inclusion of exactly one element of a number or list of elements. In general, the term “or” as used herein shall only be interpreted as indicating exclusive alternatives (i.e., “one or the other but not both”) when preceded by terms of exclusivity, such as “either,” “one of,” “only one of,” or “exactly one of.”

[0057] As used herein, the terms “including,” “includes,” “having,” “has,” “with,” or variants thereof, are intended to be inclusive similar to the term “comprising.”

[0058] As used herein, the term “about” means plus or minus 10% of the indicated value. For example, about 100 means from 90 to 110. Numerical ranges recited herein by endpoints include all numbers and fractions subsumed within that range (e.g., 1 to 5 includes 1, 1.5, 2, 2.75, 3, 3.90, 4, and 5). It is also to be understood that all numbers and fractions thereof are presumed to be modified by the term “about.”

[0059] The terms “individual,” “subject,” and “patient,” are used interchangeably herein and refer to any subject for whom diagnosis, treatment, or therapy is desired, including a mammal. Mammals include, but are not limited to, humans, farm animals, sport animals and pets. A “subject” is a vertebrate, such as a mammal, including a human. Mammals include, but are not limited to, humans, farm animals, sport animals and companion animals. Included in the term “animal” is dog, cat, fish, gerbil, guinea pig, hamster, horse, rabbit, swine, mouse, monkey (e.g., ape, gorilla, chimpanzee, orangutan) rat, sheep, goat, cow and bird.

[0060] The terms “treatment”, “treating” and the like are used herein to generally mean obtaining a desired pharmacologic and/or physiologic effect, such as arresting or inhibiting, or attempting to arrest or inhibit, the development or progression of a disorder and/or causing, or attempting to cause, the reduction, suppression, regression, or remission of a disorder and/or a symptom thereof. The effect may be prophylactic in terms of completely or partially preventing a disease or symptom thereof and/or may be therapeutic in terms of a partial or complete cure for a disease and/or adverse effect attributable to the disease. As would be understood by those skilled in the art, various clinical and scientific methodologies and assays may be used to assess the development or progression of a disorder, and similarly, various clinical and scientific methodologies and assays may be used to assess the reduction, regression, or remission of a disorder or its symptoms. Additionally, treatment can be applied to a subject or to a cell culture (in vivo or in vitro).

[0061] The terms “inhibit”, “inhibiting”, and “inhibition” refer to the slowing, halting, or reversing the growth or progression of a disease, infection, condition, group of cells, protein or its expression. The inhibition can be greater than about 20%, 40%, 60%, 80%, 90%, 95%, or 99%, for example, compared to the growth or progression that occurs in the absence of the treatment or contacting.

[0062] “Expression” refers to the production of RNA from DNA and/or the production of protein directed by genetic material (e.g., RNA (mRNA)). Inducible expression, as opposed to constitutive expression (expressed all the time), is expression which only occurs under certain conditions, such as in the presence of specific molecule (e.g., arabinose) or an environmental que.

[0063] The term “exogenous” as used herein with reference to a nucleic acid (or a protein) and a host refers to a nucleic acid that does not occur in (and cannot be obtained from) a cell of that particular type as it is found in nature or a protein encoded by such a nucleic acid. Thus, a nonnaturally-occurring nucleic acid is considered to be exogenous to a host once in the host. It is important to note that non-naturally occurring nucleic acids can contain nucleic acid subsequences or fragments of nucleic acid sequences that are found in nature provided the nucleic acid as a whole does not exist in nature. For example, a nucleic acid molecule containing a genomic DNA sequence within an expression vector is non-naturally occurring nucleic acid, and thus is exogenous to a host cell once introduced into the host, since that nucleic acid molecule as a whole (genomic DNA plus vector DNA) does not exist in nature. Thus, any vector, autonomously replicating plasmid, or virus (e.g., retrovirus, adenovirus, or herpes virus) that as a whole does not exist in nature is considered to be non-naturally occurring nucleic acid. It follows that genomic DNA fragments produced by PCR or restriction endonuclease treatment as well as cDNAs are considered to be non-naturally occurring nucleic acid since they exist as separate molecules not found in nature. An exogenous sequence may therefore be integrated into the genome of the host. It also follows that any nucleic acid containing a promoter sequence and polypeptide-encoding sequence (e.g., cDNA or genomic DNA) in an arrangement not found in nature is non-naturally occurring nucleic acid. A nucleic acid that is naturally occurring can be exogenous to a particular host microorganism. For example, an entire chromosome isolated from a cell of yeast x is an exogenous nucleic acid with respect to a cell of yeast y once that chromosome is introduced into a cell of yeast y.

[0064] In contrast, the term “endogenous” as used herein with reference to a nucleic acid (e.g., a gene) (or a protein) and a host refers to a nucleic acid (or protein) that does occur in (and can be obtained from) that particular host as it is found in nature. Moreover, a cell “endogenously expressing” a nucleic acid (or protein) expresses that nucleic acid (or protein) as does a host of the same particular type as it is found in nature. Moreover, a host “endogenously producing” or that “endogenously produces” a nucleic acid, protein, or other compound produces that nucleic acid, protein, or compound as does a host of the same particular type as it is found in nature.

[0065] Flagella are filamentous protein structures found in bacteria, archaea, and eukaryotes, though they are most commonly found in bacteria. They are typically used to propel a cell through liquid (i.e., bacteria and sperm). However, flagella have many other specialized functions. Flagella are usually found in gram-negative bacilli. Gram-positive rods (e.g., Listeria species) and cocci (some Enterococcus species, Vagococcus species) also have flagella.

[0066] Engineered Salmonella could be any strain of Salmonella designed to lyse and deliver protein intracellularly.

[0067] The term “contacting” refers to the act of touching, making contact, or of bringing to immediate or close proximity, including at the cellular or molecular level, for example, to bring about a physiological reaction, a chemical reaction, or a physical change, e.g., in a solution, in a reaction mixture, in vitro, or in vivo.

[0068] An “effective amount” is an amount sufficient to effect beneficial or desired result, such as a preclinical or clinical result. An effective amount can be administered in one or more administrations. The term “effective amount,” as applied to the compound(s), biologics and pharmaceutical compositions described herein, means the quantity necessary to render the desired therapeutic result. For example, an effective amount is a level effective to treat, cure, or alleviate the symptoms of a disorder and/or disease for which the therapeutic compound, biologic or composition is being administered. Amounts effective for the particular therapeutic goal sought will depend upon a variety of factors including the disorder being treated and its severity and/or stage of development/progression; the bioavailability, and activity of the specific compound, biologic or pharmaceutical composition used; the route or method of administration and introduction site on the subject; the rate of clearance of the specific compound or biologic and other pharmacokinetic properties; the duration of treatment; inoculation regimen; drugs used in combination or coincident with the specific compound, biologic or composition; the age, body weight, sex, diet, physiology and general health of the subject being treated; and like factors well known to one of skill in the relevant scientific art. Some variation in dosage can occur depending upon the condition of the subject being treated, and the physician or other individual administering treatment will, in any event, determine the appropriate dose for an individual patient.

[0069] As used herein, “disorder” refers to a disorder, disease or condition, or other departure from healthy or normal biological activity, and the terms can be used interchangeably. The terms would refer to any condition that impairs normal function. The condition may be caused by sporadic or heritable genetic abnormalities. The condition may also be caused by non-genetic abnormalities. The condition may also be caused by injuries to a subject from environmental factors, such as, but not limited to, cutting, crushing, burning, piercing, stretching, shearing, injecting, or otherwise modifying a subject's cell(s), tissue(s), organ(s), system(s), or the like.

[0070] The terms “cell,” “cell line,” and “cell culture” as used herein may be used interchangeably. All of these terms also include their progeny, which are any and all subsequent generations. It is understood that all progeny may not be identical due to deliberate or inadvertent mutations.

[0071] A “coding region” of a gene consists of the nucleotide residues of the coding strand of the gene and the nucleotides of the non-coding strand of the gene which are homologous with or complementary to, respectively, the coding region of an mRNA molecule which is produced by transcription of the gene.

[0072] “Complementary” as used herein refers to the broad concept of subunit sequence complementarity between two nucleic acids, e.g., two DNA molecules. When a nucleotide position in both of the molecules is occupied by nucleotides normally capable of base pairing with each other, then the nucleic acids are considered to be complementary to each other at this position. Thus, two nucleic acids are complementary to each other when a substantial number (at least 50%) of corresponding positions in each of the molecules are occupied by nucleotides which normally base pair with each other (e.g., A:T and G:C nucleotide pairs). Thus, it is known that an adenine residue of a first nucleic acid region is capable of forming specific hydrogen bonds (“base pairing”) with a residue of a second nucleic acid region which is antiparallel to the first region if the residue is thymine or uracil. Similarly, it is known that a cytosine residue of a first nucleic acid strand is capable of base pairing with a residue of a second nucleic acid strand which is antiparallel to the first strand if the residue is guanine. A first region of a nucleic acid is complementary to a second region of the same or a different nucleic acid if, when the two regions are arranged in an antiparallel fashion, at least one nucleotide residue of the first region is capable of base pairing with a residue of the second region. Preferably, the first region comprises a first portion and the second region comprises a second portion, whereby, when the first and second portions are arranged in an antiparallel fashion, at least about 50%, and preferably at least about 75%, at least about 90%, or at least about 95% of the nucleotide residues of the first portion are capable of base pairing with nucleotide residues in the second portion. More preferably, all nucleotide residues of the first portion are capable of base pairing with nucleotide residues in the second portion.

[0073] “Encoding” refers to the inherent property of specific sequences of nucleotides in a polynucleotide, such as a gene, a cDNA, or an mRNA, to serve as templates for synthesis of other polymers and macromolecules in biological processes having either a defined sequence of nucleotides (i.e., rRNA, tRNA and mRNA) or a defined sequence of amino acids and the biological properties resulting therefrom. Thus, a gene encodes a protein if transcription and translation of mRNA corresponding to that gene produces the protein in a cell or other biological system. Both the coding strand, the nucleotide sequence of which is identical to the mRNA sequence and is usually provided in sequence listings, and the non-coding strand, used as the template for transcription of a gene or cDNA, can be referred to as encoding the protein or other product of that gene or cDNA.

[0074] As used herein, an “essentially pure” preparation of a particular protein or peptide is a preparation wherein at least about 95%, and preferably at least about 99%, by weight, of the protein or peptide in the preparation is the particular protein or peptide.

[0075] A “fragment” or “segment” is a portion of an amino acid sequence, comprising at least one amino acid, or a portion of a nucleic acid sequence comprising at least one nucleotide. The terms “fragment” and “segment” are used interchangeably herein.

[0076] As used herein, a “functional” biological molecule is a biological molecule in a form in which it exhibits a property by which it is characterized. A functional enzyme, for example, is one which exhibits the characteristic catalytic activity by which the enzyme is characterized.

[0077] “Homologous” as used herein, refers to the subunit sequence similarity between two polymeric molecules, e.g., between two nucleic acid molecules, e.g., two DNA molecules or two RNA molecules, or between two polypeptide molecules. When a subunit position in both of the two molecules is occupied by the same monomeric subunit, e.g., if a position in each of two DNA molecules is occupied by adenine, then they are homologous at that position. The homology between two sequences is a direct function of the number of matching or homologous positions, e.g., if half (e.g., five positions in a polymer ten subunits in length) of the positions in two compound sequences are homologous then the two sequences are 50% homologous, if 90% of the positions, e.g., 9 of 10, are matched or homologous, the two sequences share 90% homology. By way of example, the DNA sequences 3′ATTGCC5′ and 3′TATGGC share 50% homology.

[0078] As used herein, “homology” is used synonymously with “identity.”

[0079] The determination of percent identity between two nucleotide or amino acid sequences can be accomplished using a mathematical algorithm. For example, a mathematical algorithm useful for comparing two sequences is the algorithm of Karlin and Altschul (1990, Proc. Natl. Acad. Sci. USA 87:2264-2268), modified as in Karlin and Altschul (1993, Proc. Natl. Acad. Sci. USA 90:5873-5877). This algorithm is incorporated into the NBLAST and XBLAST programs of Altschul, et al. (1990, J. Mol. Biol. 215:403-410), and can be accessed, for example at the National Center for Biotechnology Information (NCBI) world wide web site having the universal resource locator using the BLAST tool at the NCBI website. BLAST nucleotide searches can be performed with the NBLAST program (designated “blastn” at the NCBI web site), using the following parameters: gap penalty=5; gap extension penalty=2; mismatch penalty=3; match reward=1; expectation value 10.0; and word size=11 to obtain nucleotide sequences homologous to a nucleic acid described herein. BLAST protein searches can be performed with the XBLAST program (designated “blastn” at the NCBI web site) or the NCBI “blastp” program, using the following parameters: expectation value 10.0, BLOSUM62 scoring matrix to obtain amino acid sequences homologous to a protein molecule described herein. To obtain gapped alignments for comparison purposes, Gapped BLAST can be utilized as described in Altschul et al. (1997, Nucleic Acids Res. 25:3389-3402). Alternatively, PSI-Blast or PHI-Blast can be used to perform an iterated search which detects distant relationships between molecules (Id.) and relationships between molecules which share a common pattern. When utilizing BLAST, Gapped BLAST, PSI-Blast, and PHI-Blast programs, the default parameters of the respective programs (e.g., XBLAST and NBLAST) can be used.

[0080] The percent identity between two sequences can be determined using techniques similar to those described above, with or without allowing gaps. In calculating percent identity, typically exact matches are counted.

[0081] As used herein, the term “hybridization” is used in reference to the pairing of complementary nucleic acids. Hybridization and the strength of hybridization (i.e., the strength of the association between the nucleic acids) is impacted by such factors as the degree of complementarity between the nucleic acids, stringency of the conditions involved, the length of the formed hybrid, and the G:C ratio within the nucleic acids.

[0082] As used herein, an “instructional material” includes a publication, a recording, a diagram, or any other medium of expression which can be used to communicate the usefulness of the peptide of the invention in the kit for effecting alleviation of the various diseases or disorders recited herein. Optionally, or alternately, the instructional material may describe one or more methods of alleviating the diseases or disorders in a cell or a tissue of a mammal. The instructional material of the kit of the invention may, for example, be affixed to a container which contains the identified compound invention or be shipped together with a container which contains the identified compound. Alternatively, the instructional material may be shipped separately from the container with the intention that the instructional material and the compound be used cooperatively by the recipient.

[0083] The term “nucleic acid” typically refers to large polynucleotides. By “nucleic acid” is meant any nucleic acid, whether composed of deoxyribonucleosides or ribonucleosides, and whether composed of phosphodiester linkages or modified linkages such as phosphotriester, phosphoramidate, siloxane, carbonate, carboxymethylester, acetamidate, carbamate, thioether, bridged phosphoramidate, bridged methylene phosphonate, bridged phosphoramidate, bridged phosphoramidate, bridged methylene phosphonate, phosphorothioate, methylphosphonate, phosphorodithioate, bridged phosphorothioate or sulfone linkages, and combinations of such linkages. The term nucleic acid also specifically includes nucleic acids composed of bases other than the five biologically occurring bases (adenine, guanine, thymine, cytosine and uracil).

[0084] As used herein, the term “nucleic acid” encompasses RNA as well as single and double stranded DNA and cDNA. Furthermore, the terms, “nucleic acid,” “DNA,” “RNA” and similar terms also include nucleic acid analogs, i.e., analogs having other than a phosphodiester backbone. For example, the so called “peptide nucleic acids,” which are known in the art and have peptide bonds instead of phosphodiester bonds in the backbone, are considered within the scope of the present invention. By “nucleic acid” is meant any nucleic acid, whether composed of deoxyribonucleosides or ribonucleosides, and whether composed of phosphodiester linkages or modified linkages such as phosphotriester, phosphoramidate, siloxane, carbonate, carboxymethylester, acetamidate, carbamate, thioether, bridged phosphoramidate, bridged methylene phosphonate, bridged phosphoramidate, bridged phosphoramidate, bridged methylene phosphonate, phosphorothioate, methylphosphonate, phosphorodithioate, bridged phosphorothioate or sulfone linkages, and combinations of such linkages. The term nucleic acid also specifically includes nucleic acids composed of bases other than the five biologically occurring bases (adenine, guanine, thymine, cytosine, and uracil). Conventional notation is used herein to describe polynucleotide sequences: the left-hand end of a single-stranded polynucleotide sequence is the 5′-end; the left-hand direction of a double-stranded polynucleotide sequence is referred to as the 5′-direction. The direction of 5′ to 3′ addition of nucleotides to nascent RNA transcripts is referred to as the transcription direction. The DNA strand having the same sequence as an mRNA is referred to as the “coding strand”; sequences on the DNA strand which are located 5′ to a reference point on the DNA are referred to as “upstream sequences”; sequences on the DNA strand which are 3′ to a reference point on the DNA are referred to as “downstream sequences.”

[0085] The term “nucleic acid construct,” as used herein, encompasses DNA and RNA sequences encoding the particular gene or gene fragment desired, whether obtained by genomic or synthetic methods.

[0086] Unless otherwise specified, a “nucleotide sequence encoding an amino acid sequence” includes all nucleotide sequences that are degenerate versions of each other and that encode the same amino acid sequence. Nucleotide sequences that encode proteins and RNA may include introns.

[0087] The term “oligonucleotide” typically refers to short polynucleotides, generally, no greater than about 50 nucleotides. It will be understood that when a nucleotide sequence is represented by a DNA sequence (i.e., A, T, G, C), this also includes an RNA sequence (i.e., A, U, G, C) in which “U” replaces “T.”

[0088] “Substantially homologous nucleic acid sequence” means a nucleic acid sequence corresponding to a reference nucleic acid sequence wherein the corresponding sequence encodes a peptide having substantially the same structure and function as the peptide encoded by the reference nucleic acid sequence; e.g., where only changes in amino acids not significantly affecting the peptide function occur. Preferably, the substantially identical nucleic acid sequence encodes the peptide encoded by the reference nucleic acid sequence. The percentage of identity between the substantially similar nucleic acid sequence and the reference nucleic acid sequence is at least about 50%, 65%, 75%, 85%, 95%, 99% or more. Substantial identity of nucleic acid sequences can be determined by comparing the sequence identity of two sequences, for example by physical/chemical methods (i.e., hybridization) or by sequence alignment via computer algorithm. Suitable nucleic acid hybridization conditions to determine if a nucleotide sequence is substantially similar to a reference nucleotide sequence are: 7% sodium dodecyl sulfate SDS, 0.5 M NaPO4, 1 mM EDTA at 50° C. with washing in 2× standard saline citrate (SSC), 0.1% SDS at 50° C.; preferably in 7% (SDS), 0.5 M NaPO4, 1 mM EDTA at 50° C. with washing in 1×SSC, 0.1% SDS at 50° C.; preferably 7% SDS, 0.5 M NaPO4, 1 mM EDTA at 50° C. with washing in 0.5×SSC, 0.1% SDS at 50° C.; and more preferably in 7% SDS, 0.5 M NaPO4, 1 mM EDTA at 50° C. with washing in 0.1×SSC, 0.1% SDS at 65° C. Suitable computer algorithms to determine substantial similarity between two nucleic acid sequences include, GCS program package (Devereux et al., 1984 Nucl. Acids Res. 12:387), and the BLASTN or FASTA programs (Altschul et al., 1990 Proc. Natl. Acad. Sci. USA. 1990 87:14:5509-13; Altschul et al., J. Mol. Biol. 1990 215:3:403-10; Altschul et al., 1997 Nucleic Acids Res. 25:3389-3402). The default settings provided with these programs are suitable for determining substantial similarity of nucleic acid sequences for purposes of the present invention.

[0089] By describing two polynucleotides as “operably linked” is meant that a single-stranded or double-stranded nucleic acid moiety comprises the two polynucleotides arranged within the nucleic acid moiety in such a manner that at least one of the two polynucleotides is able to exert a physiological effect by which it is characterized upon the other. By way of example, a promoter operably linked to the coding region of a gene is able to promote transcription of the coding region.

[0090] As used herein, the term “pharmaceutically acceptable carrier” means a chemical composition with which an appropriate compound or derivative can be combined and which, following the combination, can be used to administer the appropriate compound to a subject. “Pharmaceutically acceptable” means physiologically tolerable, for either human or veterinary application. As used herein, “pharmaceutical compositions” include formulations for human and veterinary use.

[0091] As used herein, the term “purified” and like terms relate to an enrichment of a molecule or compound relative to other components normally associated with the molecule or compound in a native environment. The term “purified” does not necessarily indicate that complete purity of the particular molecule has been achieved during the process. A “highly purified” compound as used herein refers to a compound that is greater than 90% pure. In particular, purified sperm cell DNA refers to DNA that does not produce significant detectable levels of non-sperm cell DNA upon PCR amplification of the purified sperm cell DNA and subsequent analysis of that amplified DNA. A “significant detectable level” is an amount of contaminate that would be visible in the presented data and would need to be addressed/explained during analysis of the forensic evidence.

[0092] “Recombinant polynucleotide” refers to a polynucleotide having sequences that are not naturally joined together. An amplified or assembled recombinant polynucleotide may be included in a suitable vector, and the vector can be used to transform a suitable host cell.

[0093] A recombinant polynucleotide may serve a non-coding function (e.g., promoter, origin of replication, ribosome-binding site, etc.) as well.

[0094] A host cell that comprises a recombinant polynucleotide is referred to as a “recombinant host cell.” A gene which is expressed in a recombinant host cell wherein the gene comprises a recombinant polynucleotide, produces a “recombinant polypeptide.”

[0095] A “recombinant polypeptide” is one which is produced upon expression of a recombinant polynucleotide.

[0096] A “recombinant cell” is a cell that comprises a transgene. Such a cell may be a eukaryotic or a prokaryotic cell. Also, the transgenic cell encompasses, but is not limited to, an embryonic stem cell comprising the transgene, a cell obtained from a chimeric mammal derived from a transgenic embryonic stem cell where the cell comprises the transgene, a cell obtained from a transgenic mammal, or fetal or placental tissue thereof, and a prokaryotic cell comprising the transgene.

[0097] The term “regulate” refers to either stimulating or inhibiting a function or activity of interest.

[0098] By “small interfering RNAs (siRNAs)” is meant, inter alia, an isolated dsRNA molecule comprised of both a sense and an anti-sense strand. In one aspect, it is greater than 10 nucleotides in length. siRNA also refers to a single transcript which has both the sense and complementary antisense sequences from the target gene, e.g., a hairpin. siRNA further includes any form of dsRNA (proteolytically cleaved products of larger dsRNA, partially purified RNA, essentially pure RNA, synthetic RNA, recombinantly produced RNA) as well as altered RNA that differs from naturally occurring RNA by the addition, deletion, substitution, and/or alteration of one or more nucleotides.

[0099] By the term “specifically binds to”, as used herein, is meant when a compound or ligand functions in a binding reaction or assay conditions which is determinative of the presence of the compound in a sample of heterogeneous compounds, or it means that one molecule, such as a binding moiety, e.g., an oligonucleotide or antibody, binds preferentially to another molecule, such as a target molecule, e.g., a nucleic acid or a protein, in the presence of other molecules in a sample.

[0100] The terms “specific binding” or “specifically binding” when used in reference to the interaction of a peptide (ligand) and a receptor (molecule) also refers to an interaction that is dependent upon the presence of a particular structure (i.e., an amino sequence of a ligand or a ligand binding domain within a protein); in other words the peptide comprises a structure allowing recognition and binding to a specific protein structure within a binding partner rather than to molecules in general. For example, if a ligand is specific for binding pocket “A,” in a reaction containing labeled peptide ligand “A” (such as an isolated phage displayed peptide or isolated synthetic peptide) and unlabeled “A” in the presence of a protein comprising a binding pocket A the unlabeled peptide ligand will reduce the amount of labeled peptide ligand bound to the binding partner, in other words a competitive binding assay.

[0101] The term “standard,” as used herein, refers to something used for comparison. For example, it can be a known standard agent or compound which is administered and used for comparing results when administering a test compound, or it can be a standard parameter or function which is measured to obtain a control value when measuring an effect of an agent or compound on a parameter or function. Standard can also refer to an “internal standard”, such as an agent or compound which is added at known amounts to a sample and is useful in determining such things as purification or recovery rates when a sample is processed or subjected to purification or extraction procedures before a marker of interest is measured. Internal standards are often a purified marker of interest which has been labeled, such as with a radioactive isotope, allowing it to be distinguished from an endogenous marker.

[0102] Methods involving conventional molecular biology techniques are described herein. Such techniques are generally known in the art and are described in detail in methodology treatises, such as Molecular Cloning: A Laboratory Manual, 2nd ed., vol. 1-3, ed. Sambrook et al., Cold Spring Harbor Laboratory Press, Cold Spring Harbor, N.Y., 1989; and Current Protocols in Molecular Biology, ed. Ausubel et al., Greene Publishing and Wiley-Interscience, New York, 1992 (with periodic updates). Methods for chemical synthesis of nucleic acids are discussed, for example, in Beaucage and Carruthers, Tetra. Letts. 22: 1859-1862, 1981, and Matteucci et al., J. Am. Chem. Soc. 103:3185, 1981.

[0103] As used herein, the terms “including”, “includes”, “having”, “has”, “with”, or variants thereof, are intended to be inclusive similar to the term “comprising.”

[0104] The terms “comprises,” “comprising,” and the like can have the meaning ascribed to them in U.S. Patent Law and can mean “includes,” “including” and the like. As used herein, “including” or “includes” or the like means including, without limitation.

### I. Bacteria/Flagella

[0105] Bacteria useful in the invention include, but are not limited to, Clostridium, Bifidus, Escherichia coli or Salmonella, T3SS-dependent bacteria, such as shigella, salmonella and Yersinia Pestis. Further, E. coli can be used if the T3SS system is place in E. Coli.

### Salmonella

[0106] Examples of Salmonella strains which can be employed in the present invention include Salmonella typhi (ATCC No. 7251) and S. typhimurium (ATCC No. 13311). Attenuated Salmonella strains include S. typhi-aroC-aroD (Hone et al. Vacc. 9:810 (1991) S. typhimurium-aroA mutant (Mastroeni et al. Micro. Pathol. 13:477 (1992)) and Salmonella typhimurium 7207. Additional attenuated Salmonella strains that can be used in the invention include one or more other attenuating mutations such as (i) auxotrophic mutations, such as aro (Hoiseth et al. Nature, 291:238-239 (1981)), gua (McFarland et al Microbiol. Path., 3:129-141 (1987)), nad (Park et al. J. Bact, 170:3725-3730 (1988), thy (Nnalue et al. Infect. Immun., 55:955-962 (1987)), and asd (Curtiss, supra) mutations; (ii) mutations that inactivate global regulatory functions, such as cya (Curtiss et al. Infect. Immun., 55:3035-3043 (1987)), crp (Curtiss et al (1987), supra), phoP/phoQ (Groisman et al. Proc. Natl. Acad. Sci., USA, 86:7077-7081 (1989); and Miller et al. Proc. Natl. Acad. Sci., USA, 86:5054-5058 (1989)), phop.sup.c (Miller et al. J. Bact, 172:2485-2490 (1990)) or ompR (Dorman et al. Infect. Immun., 57:2136-2140 (1989)) mutations; (iii) mutations that modify the stress response, such as recA (Buchmeier et al. MoI. Micro., 7:933-936 (1993)), htrA (Johnson et al. MoI. Micro., 5:401-407 (1991)), htpR (Neidhardt et al. Biochem. Biophys. Res. Com., 100:894-900 (1981)), hsp (Neidhardt et al. Ann. Rev. Genet, 18:295-329 (1984)) and groEL (Buchmeier et al. Sci., 248:730-732 (1990)) mutations; mutations in specific virulence factors, such as IsyA (Libby et al. Proc. Natl. Acad. Sci., USA, 91:489-493 (1994)), pag or prg (Miller et al (1990), supra; and Miller et al (1989), supra), iscA or virG (d'Hauteville et al. MoI. Micro., 6:833-841 (1992)), plcA (Mengaud et al. Mol. Microbiol., 5:367-72 (1991); Camilli et al. J. Exp. Med, 173:751-754 (1991)), and act (Brundage et al. Proc. Natl. Acad. Sci., USA, 90:11890-11894 (1993)) mutations; (v) mutations that affect DNA topology, such as top A (Galan et al. Infect. Immun., 58: 1879-1885 (1990)); (vi) mutations that disrupt or modify the cell cycle, such as min (de Boer et al. Cell, 56:641-649 (1989)); (vii) introduction of a gene encoding a suicide system, such as sacB (Recorbet et al. App. Environ. Micro., 59:1361-1366 (1993); Quandt et al. Gene, 127:15-21 (1993)), nuc (Ahrenholtz et al. App. Environ. Micro., 60:3746-3751 (1994)), hok, gef, kil, or phlA (Molin et al. Ann. Rev. Microbiol., 47:139-166 (1993)); (viii) mutations that alter the biogenesis of lipopolysaccharide and/or lipid A, such as rFb (Raetz in Escherichia coli and Salmonella typhimurium, Neidhardt et al, Ed., ASM Press, Washington D.C. pp 1035-1063 (1996)), galE (Hone et al. J. Infect. Dis., 156:164-167 (1987)) and htrB (Raetz, supra), msbB (Reatz, supra; and U.S. Pat. No. 7,514,089); and (ix) introduction of a bacteriophage lysis system, such as lysogens encoded by P22 (Rennell et al. Virol, 143:280-289 (1985)), lamda murein transglycosylase (Bienkowska-Szewczyk et al. Mol. Gen. Genet., 184:111-114 (1981)) or S-gene (Reader et al. Virol, 43:623-628 (1971)).

[0107] The attenuating mutations can be either constitutively expressed or under the control of inducible promoters, such as the temperature sensitive heat shock family of promoters (Neidhardt et al. supra), or the anaerobically induced nirB promoter (Harbome et al. Mol. Micro., 6:2805-2813 (1992)) or repressible promoters, such as uapA (Gorfinkiel et al. J. Biol. Chem., 268:23376-23381 (1993)) or gcv (Stauffer et al. J. Bact, 176:6159-6164 (1994)).

[0108] In one embodiment, the bacterial delivery system is safe and based on a non-toxic, attenuated Salmonella strain that has a partial deletion of the msbB gene. This deletion diminishes the TNF immune response to bacterial lipopolysaccharides and prevents septic shock. In another embodiment, it also has a partial deletion of the purI gene. This deletion makes the bacteria dependent on external sources of purines and speeds clearance from non-cancerous tissues (13). In mice, the virulence (LD₅₀) of the therapeutic strain is 10,000-fold less than wild-type Salmonella (72, 73). In pre-clinical trials, attenuated Salmonella has been administered systemically into mice and dogs without toxic side effects (17, 27). Two FDA-approved phase I clinical trials have been performed and showed that this therapeutic strain can be safely administered to patients (20). In one embodiment, the strain of bacteria is VNP20009, a derivative strain of Salmonella typhimurium. Deletion of two of its genes—msbB and purI—resulted in its complete attenuation (by preventing toxic shock in animal hosts) and dependence on external sources of purine for survival. This dependence renders the organism incapable of replicating in normal tissue such as the liver or spleen, but still capable of growing in tumors where purine is available.

[0109] Further, insertion of a failsafe circuit into the bacterial vector prevents unwanted infection and defines the end of therapy without the need for antibiotics to remove the bacteria (e.g., salmonella).

### Flagella

[0110] 1) flhDC Sequence

[0111] In one aspect, the flhDC sequence is the bicistronic, flhDC coding region found in the Salmonella Typhimurium 14028s strain or a derivative thereof

### Accession Number—

[0112] fhD-NCBI Reference Sequence: NC_016856.1
[0113] flhC-NCBI Reference Sequence: NC_016856.1

Bicistronic DNA sequence
(SEQ ID NO: 1)
ATGCATACATCCGAGTTGCTAAAACACATTTATGACATCA
ATTTGTCATATTTACTCCTTGCACAGCGTTTGATCGTCCA
GGACAAAGCATCTGCGATGTTCCGCCTCGGTATCAACGAA
GAGATGGCAAACACACTGGGCGCGTTGACCCTGCCGCAGA
TGGTCAAACTGGCGGAGACGAACCAGTTAGTTTGTCATTT
CCGGTTTGACGATCATCAGACGATCACCCGTTTGACTCAG
GATTCGCGCGTCGATGACTTACAGCAGATTCACACAGGTA
TCATGCTTTCAACGCGTCTGCTCAATGAAGTGGACGATAC
GGCGCGTAAGAAAAGGGCATGATAATGAGTGAAAAAAGCA
TTGTTCAGGAAGCTCGCGATATCCAGTTGGCGATGGAGTT
GATTAATCTTGGCGCTCGTCTACAAATGCTGGAAAGCGAA
ACACAGCTCAGCCGTGGTCGCCTCATCAGGCTGTACAAAG
AATTACGCGGTAGCCCGCCGCCTAAAGGGATGCTGCCATT
TTCGACAGACTGGTTTATGACCTGGGAGCAAAATATTCAT
GCCTCCATGTTCTGCAACGCCTGGCAATTTTTACTGAAGA
CCGGCTTATGCAGCGGTGTGGATGCGGTGATTAAAGCTTA
TCGGCTTTATCTTGAGCAGTGTCCGCAACCGCCTGAAGGG
CCGTTGTTGGCGCTGACTCGCGCATGGACGCTGGTGCGTT
TTGTTGAAAGTGGGTTGCTTGAATTGTCGAGCTGTAACTG
CTGCGGTGGGAACTTTATTACCCATGCGCATCAGCCCGTA
GGCAGCTTTGCGTGTAGTTTATGCCAGCCGCCATCCCGCG
CAGTAAAAAGACGTAAACTTTCCCGAGATGCTGCCGATAT
TATTCCACAACTGCTGGATGAACAGATCGAACAGGCTGTT
TAA
Protein sequence
flhD
(SEQ ID NO: 2)
MHTSELLKHIYDINLSYLLLAQRLIVQDKASAMFRLGINE
EMANTLGALTLPQMVKLAETNQLVCHFRFDDHQTITRLTQ
DSRVDDLQQIHTGIMLSTRLLNEVDDTARKKRA
flhC
(SEQ ID NO: 3)
MSEKSIVQEARDIQLAMELINLGARLQMLESETQLSRGRL
IRLYKELRGSPPPKGMLPFSTDWFMTWEQNIHASMFCNAW
QFLLKTGLCSGVDAVIKAYRLYLEQCPQPPEGPLLALTRA
WTLVRFVESGLLELSSCNCCGGNFITHAHQPVGSFACSLC
QPPSRAVKRRKLSRDAADIIPQLLDEQIEQAV

[0114] Other sequences can also be used to control flagella activity, these include, for example, motA, motB, flhE, cheZ, cheY cheB, cheR, cheM, cheW, cheA, fliA, fliY, fliZ, fluB, fliS, fluE, fliF, fliJ, fliL, fliM, fliN, fliO, flip, fliQ, fliR, fliG, fliH, fliI, fliT, fliD, fliC, fljB, ycrG, flgN, flgM, flgA, flgB, flgC, flgD, flgE, flgF, flgG, flgH, flgI, flgJ, flgK and/or flgL.

motA, WP_000906312.1
>WP_000906312.1 MULTISPECIES: flagellar
motor stator protein MotA [Salmonella]
(SEQ ID NO: 4)
MLILLGYLVVIGTVFGGYVMTGGHLGALYQPAELVIIGGAGIGAF
IVGNNGKAIKGTMKAIPLLFRRSKYTKSMYMDLLALLYRLMAKSR
QQGMFSLERDIENPKESEIFASYPRILADAVMLDFIVDYLRLIIS
GNMNTFEIEALMDEEIETHESEAEVPANSLAMVGDSLPAFGIVAA
VMGVVHALASADRPAAELGALIAHAMVGTFLGILLAYGFISPLAT
VLRQKSAETTKMMQCVKITLLSNLNGYAPPIAVEFGRKTLYSSER
PSFIELEEHVRAVRNPNQQQTTEEA
motB, WP_000795653.1
>WP_000795653.1 MULTISPECIES: flagellar
motor protein MotB [Salmonella]
(SEQ ID NO: 5)
MKNQAHPIVVVKRRRHKPHGGGAHGSWKIAYADFMTAMMAFFLVM
WLISISSPKELIQIAEYFRTPLATAVTGGNRIANSESPIPGGGDD
YTQQQGEVEKQPNIDELKKRMEQSRLNKLRGDLDQLIESDPKLRA
LRPHLKIDLVQEGLRIQIIDSQNRPMFKTGSAEVEPYMRDILRAI
APVLNGIPNRISLAGHTDDFPYANGEKGYSNWELSADRANASRRE
LVAGGLDNGKVLRVVGMAATMRLSDRGPDDAINRRISLLVLNKQA
EQAILHENAESQNEBVSVLQQPAAAPPASVPTSPKAEPR
flhE, WP_001233619.1
>WP_001233619.1 MULTISPECIES: flagellar
protein FlhE [Salmonella]
(SEQ ID NO: 6)
MRKWLALLLFPLTVQAAGEGAWQDSGMGVTLNYRGVSASSSPLSA
RQPVSGVMTLVAWRYELNGPTPAGLRVRLCSQSRCVELDGQSGTT
HGFAHVPAVEPLRFVWEVPGGGRLIPALKVRSNQVIVNYR
cheZ, WP_000983586.1
>WP_000983586.1 MULTISPECIES: protein
phosphatase CheZ [Salmonella]
(SEQ ID NO: 7)
MMQPSIKPADEGSAGDIIARIGSLTRMLRDSLRELGLDQAIAEAA
EAIPDARDRLDYVVQMTAQAAERALNSVEASQPHQDAMEKEAKAL
TQRWDEWFDNPIELSDARELVTDTRQFLRDVPGHTSFTNAQLLDI
MMAQDFQDLTGQVIKRMMDVIQEIERQLLMVLLENIPEQSARPKR
ENESLLNGPQVDTSKAGVVASQDQVDDLLDSLGF
cheY WP_000763861.1
>WP_000763861.1 MULTISPECIES: chemotaxis
response regulator CheY [Salmonella]
(SEQ ID NO: 8)
MADKELKFLVVDDFSTMRRIVRNLLKELGFNNVEEAEDGVDALNK
LQAGGFGFIISDWNMPNMDGLELLKTIRADSAMSALPVLMVTAEA
KKENIIAAAQAGASGYVVKPFTAATLEEKLNKIFEKLGM
cheB, WP_000036392.1
>WP_000036392.1 MULTISPECIES: protein-glutamate
methylesterase/protein glutamine deamidase
[Salmonella]
(SEQ ID NO: 9)
MSKIRVLSVDDSALMRQIMTEIINSHSDMEMVATAPDPLVARDLI
KKFNPDVLTLDVEMPRMDGLDFLEKLMRLRPMPVVMVSSLTGKGS
EVTLRALELGAIDFVTKPQLGIREGMLAYSEMIAEKVRTAARARI
AAHKPMAAPTTLKAGPLLSSEKLIAIGASTGGTEAIRHVLQPLPL
SSPAVIITQHMPPGFTRSFAERLNKLCQISVKEAEDGERVLPGHA
YIAPGDKHMELARSGANYQIKIHDGPPVNRHRPSVDVLFHSVAKH
AGRNAVGVILTGMGNDGAAGMLAMYQAGAWTIAQNEASCVVFGMP
REAINMGGVSEVVDLSQVSQQMLAKISAGQAIRI
cheR, WP_000204362.1
>WP_000204362.1 MULTISPECIES: protein-
glutamate O-methyltransferase CheR
[Salmonella]
(SEQ ID NO: 10)
MTSSLPSGQTSVLLQMTQRLALSDAHFRRICQLIYQRAGIVLADH
KRDMVYNRLVRRLRALGLDDFGRYLSMLEANQNSAEWQAFINALT
TNLTAFFREAHHFPILAEHARRRHGEYRVWSAAASTGEEPYSIAI
TLADALGMAPGRWKVFASDIDTEVLEKARSGIYRLSELKTLSPQQ
LQRYFMRGTGPHEGLVRVRQELANYVEFSSVNLLEKQYNVPGPFD
AIFCRNVMIYFDKTTQEDILRRFVPLLKPDGLLFAGHSENFSNLV
REFSLRGQTVYALSKDKA
cheM, WP_000483274.1
>WP_000483274.1 MULTISPECIES: methyl-accepting
chemotaxis protein II [Salmonella]
(SEQ ID NO: 11)
MFNRIRVVTMLMMVLGVFALLQLVSGGLLFSSLQHNQQGFVISNE
LRQQQSELTSTWDLMLQTRINLSRSAARMMMDASNQQSSAKTDLL
QNAKTTLAQAAAHYANFKNMTPLPAMAEASANVDEKYQRYQAALA
ELIQFLDNGNMDAYFAQPTQGMQNALGEALGNYARVSENLYRQTF
DQSAHDYRFAQWQLGVLAVVLVLILMVVWFGIRHALLNPLARVIT
HIREIASGDLTKTLTVSGRNEIGELAGTVEHMQRSLIDTVTQVRE
GSDAIYSGTSEIAAGNTDLSSRTEQQASALEETAASMEQLTATVK
QNADNARQASQLAQSASETARHGGKVVDGVVNTMHEIADSSKKIA
DIISVIDGIAFQTNILALNAAVEAARAGEQGRGFAVVAGEVRNLA
SRSAQAAKEIKALIEDSVSRVDTGSVLVESAGETMTDIVNAVTRV
TDIMGEIASASDEQSRGIDQVALAVSEMDRVTQQNASLVQESAAA
AAALEEQASRLTQAVSAFRLASRPLAVNKPEMRLSVNAQSGNTPQ
SLAARDDANWETF
cheW, WP_000147295.1
>WP_000147295.1 MULTISPECIES: chemotaxis
protein CheW [Salmonella]
(SEQ ID NO: 12)
MTGMSNVSKLAGEPSGQEFLVFTLGNEEYGIDILKVQEIRGYDQV
TRIANTPAFIKGVTNLRGVIVPIVDLRVKFCEGDVEYDDNTVVIV
LNLGQRVVGIVVDGVSDVLSLTAEQIRPAPEFAVTLSTEYLTGLG
ALGERMLILVNIEKLLNSEEMALLDIAASHVA
cheA, WP_000061302.1
>WP_000061302.1 MULTISPECIES: chemotaxis
protein CheA [Salmonella]
(SEQ ID NO: 13)
MSMDISDFYQTFFDEADELLADMEQHLLDLVPESPDAEQLNAIFR
AAHSIKGGAGTFGFTILQETTHLMENLLDEARRGEMQLNTDIINL
FLETKDIMQEQLDAYKNSEEPDAASFEYICNALRQLALEAKGETT
PAVVETAALSAAIQEESVAETESPRDESKLRIVLSRLKANEVDLL
EEELGNLATLTDVVKGADSLSATLDGSVAEDDIVAVLCFVIEADQ
IAFEKVVAAPVEKAQEKTEVAPVAPPAVVAPAAKSAAHEHHAGRE
KPARERESTSIRVAVEKVDQLINLVGELVITQSMLAQRSNELDPV
NHGDLITSMGQLQRNARDLQESVMSIRMMPMEYVFSRFPRLVRDL
AGKLGKQVELTLVGSSTELDKSLIERIIDPLTHLVRNSLDHGIEM
PEKRLEAGKNVVGNLILSAEHQGGNICIEVTDDGAGLNRERILAK
AMSQGMAVNENMTDDEVGMLIFAPGFSTAEQVTDVSGRGVGMDVV
KRNIQEMGGHVEIQSKOGSGTTIRILLPLTLAILDGMSVRVAGEV
FILPLNAVMESLQPREEDLHPLAGGERVLEVRGEYLPLVELWKVF
DVDGAKTEATQGIVVILQSAGRRYALLVDQLIGQHQVVVKNLESN
YRKVPGISAATILGDGSVALIVDVSALQGLNREQRMAITAA
fliA, WP_001087453.1
>WP_001087453.1 MULTISPECIES: RNA polymerase
sigma factor FliA [Salmonella]
(SEQ ID NO: 14)
MNSLYTAEGVMDKHSLWQRYVPLVRHEALRLQVRLPASVELDDLL
QAGGIGLLNAVDRYDALQGTAFTTYAVQRIRGAMLDELRSRDWVP
RSVRRNAREVAQAMGQLEQELGRNATETEVAERLGIPVAEYRQML
LDTNNSQLFSYDEWREEHGDSIELVTEEHQQENPLHQLLEGDLRQ
RVMDAIESLPEREQLVLTLYYQEELNLKEIGAVLEVGESRVSQLH
SQAIKRLRTKLGKL
fliY, WP_000761635.1
>WP_000761635.1 MULTISPECIES: cystine ABC
transporter substrate-binding protein
[Salmonella]
(SEQ ID NO: 15)
MKLALLGRQALMGVMAVALVAGMSAKSFADEGLLNKVKERGTLLV
GLEGTYPPFSFQGEDGKLTGFEVDFAEALAKHLGVKASLKPTKWD
GMLASLDAKRIDVVINQVTISDVRKKKYDFSTPYTVSGIQALVKK
GNEGTIKTAADLQGKKVGVGLGTNYEEWLRQHVQGVDIRTYDDDP
TKYQDLRVGRIDAILVDRLAALDLVKKTKGTLAVTGDAFSRQESG
VALRKGNEDLLKAVDNAIAEMQKDGTLKALSEKWFGADVTQ
fliZ, WP_000218080.1
>WP_000218080.1 MULTISPECIES: flagella
biosynthesis regulatory protein FliZ
[Salmonella]
(SEQ ID NO: 16)
MTVQQPKRRPLSRYLKDFKHSQTHCAHCHKLLDRITLVRRGKIVN
KIAISQLDMLLDDAAWQREQKEWVALCRFCGDLHCKKQSDFFDII
GFKQYLFEQTEMSHGTVREYVVRLRRLGNYLSEQNISHDLLQDGF
LDESLAPWLPETSTNNYRIALRKYQQYKAHQQIAPROKSPFTASS
DIY
fliB, WP_000079794.1
>WP_000079794.1 MULTISPECIES: FliC/FljB
family flagellin [Salmonella]
(SEQ ID NO: 17)
MAQVINTNSLSLLTQNNLNKSQSALGTAIERLSSGLRINSAKDDA
AGQAIANRFTANIKGLTQASRNANDGISIAQTTEGALNEINNNLQ
RVRELAVQSANSTNSQSDLDSIQAEITQRLNEIDRVSGQTQFNGV
KVLAQDNTLTIQVGANDGETIDIDLKQINSQTLGLDSLNVQKAYD
VKDTAVTTKAYANNGTTLDVSGLDDAAIKAATGGTNGTASVTGGA
VKFDADNNKYFVTIGGFTGADAAKNGDYEVNVATDGTVTLAAGAT
KTTMPAGATTKTEVQELKDTPAVVSADAKNALIAGGVDATDANGA
ELVKMSYTDKNGKTIEGGYALKAGDKYYAADYDEATGAIKAKTTS
YTAADGTTKTAANQLGGVDGKTEVVTIDGKTYNASKAAGHDFKAQ
PELAEAAAKTTENPLQKIDAALAQVDALRSDLGAVQNRFNSAITN
LGNTVNNLSEARSRIEDSDYATEVSNMSRAQILQQAGTSVLAQAN
QVPQNVLSLLR
fliS, WP_000287764.1
>WP_000287764.1 MULTISPECIES: flagellar
export chaperone FliS [Salmonella]
(SEQ ID NO: 18)
MYTASGIKAYAQVSVESAVMSASPHQLIEMLFDGANSALVRARLF
LEQGDVVAKGEALSKAINIIDNGLKAGLDQEKGGEIATNLSELYD
YMIRRLLQANLRNDAQAIEEVEGLLSNIAEAWKQISPKASFQESR
fliE, WP_000719036.1
>WP_000719036.1 MULTISPECIES: flagellar
hook-basal body complex protein FliE [Salmonella]
(SEQ ID NO: 19)
MAAIQGIEGVISQLQATAMAARGQDTHSQSTVSFAGQLHAALDRI
SDRQAAARVQAEKFTLGEPGIALNDVMADMQKASVSMQMGIQVRN
KLVAAYQEVMSMQV
fliF, WP_001276834.1
>WP_001276834.1 MULTISPECIES: flagellar
M-ring protein FliF [Salmonella]
(SEQ ID NO: 20)
MSATASTATQPKPLEWLNRLRANPRIPLIVAGSAAVAIVVAMVLW
AKTPDYRTLFSNLSDQDGGAIVAQLTQMNIPYRFANGSGAIEVPA
DKVHELRLRLAQQGLPKGGAVGFELLDQEKFGISQFSEQVNYQRA
LEGELARTIETLGPVKSARVHLAMPKPSLFVREQKSPSASVTVTL
EPGRALDEGQISAVVHLVSSAVAGLPPGNVTLVDQSGHLLTQSNT
SGRDLNDAQLKFANDVESRIQRRIEAILSPIVGNGNVHAQVTAQL
DFANKEQTEEHYSPNGDASKATLRSROLNISEQVGAGYPGGVPGA
LSNQPAPPNEAPIATPPTNQQNAQNTPQTSTSTNSNSAGPRSTQR
NETSNYEVDRTIRHTKMNVGDIERLSVAVVVNYKTLADGKPLPLT
ADQMKQIEDLTREAMGFSDKRGDTLNVVNSPFSAVDNTGGELPFW
QQQSFIDQLLAAGRWLLVLVVAWILWRKAVRPQLTRRVEEAKAAQ
EQAQVRQETEEAVEVRLSKDEQLQQRRANQRLGAEVMSQRIREMS
DNDPRVVALVIRQWMSNDHE
fliJ, WP_000046981.1
>WP_000046981.1 MULTISPECIES: flagella
biosynthesis chaperone FliJ [Salmonella]
(SEQ ID NO: 21)
MAQHGALETLKDLAEKEVDDAARLLGEMRRGCQQAEEQLKMLID
YQNEYRSNLNTDMGNGIASNRWINYQQFIQTLEKAIEQHRLQLT
QWTQKVDLALKSWREKKQRLQAWQTLQDRQTAAALLAENRMDQK
KMDEFAQRAAMRKPE
fliL, WP_000132169.1
>WP_000132169.1 MULTISPECIES: flagellar basal
body-associated protein FliL [Salmonella]
(SEQ ID NO: 22)
MTDSAINKKSKRSIWIPLLVLITLAACATAGYSYWRMQQQPTTNA
KAEPAPPPAPVFFALDTFTVNLGDADRVLYIGVTLRLKDEATRAR
LNEYLPEVRSRLLLLFSRQNAAELSTEAGKQKLIAAIKETLAAPL
VAGQPKQVVTDVLYTAFILR
fliM, WP_000502811.1
>WP_000502811.1 MULTISPECIES: flagellar
motor switch protein FliM [Salmonella]
(SEQ ID NO: 23)
MGDSILSQAEIDALLNGDSDTKDEPTPGIASDSDIRPYDPNTQRR
VVRERLOALEIINERFARQFRMGLFNLLRRSPDITVGAIRIQPYH
EFARNLPVPTNLNLIHLKPLRGTGLVVFSPSLVFIAVDNLFGGDG
RFPTKVEGREFTHTEQRVINRMLKLALEGYSDAWKAINPLEVEYV
RSEMQVKFTNITTSPNDIVVNTPFHVEIGNLTGEFNICLPFSMIE
PLRELLVNPPLENSRHEDQNWRDNLVRQVQHSELELVANFADIPL
RLSQILKLKPGDVLPIEKPDRIIAHVDGVPVLTSQYGTVNGQYAL
RVEHLINPILNSLNEEQPK
fliN, WP_001282115.1
>WP_001282115.1 MULTISPECIES: flagellar
motor switch protein FliN [Salmonella]
(SEQ ID NO: 24)
MSDMNNPSDENTGALDDLWADALNEQKATTTKSAADAVFQQLGGG
DVSGAMQDIDLIMDIPVKLTVELGRTRMTIKELLRLTQGSVVALD
GLAGEPLDILINGYLIAQGEVVVVADKYGVRITDIITPSERMRRL
SR
fliO, WP_000978276.1
>WP_000978276.1 MULTISPECIES: flagellar type III
secretion system protein FliO [Salmonella]
(SEQ ID NO: 25)
MMKTEATVSQPTAPAGSPLMQVSGALIGIIALILAAAWVIKRMGF
APKGNSVRGLKVSASASLGPRERVVIVEVENARLVLGVTASQINL
LHTLPPAENDTEAPVAPPADFQNMMKSLLKRSGRS
fliP, WP_001253410.1
>WP_001253410.1 MULTISPECIES: flagellar type III
secretion system pore protein FliP [Salmonella]
(SEQ ID NO: 26)
MRRLLFLSLAGLWLFSPAAAAQLPGLISQPLAGGGQSWSLSVQTL
VFITSLTFLPAILLMMTSFTRIIIVFGLLRNALGTPSAPPNQVLL
GLALFLTFFIMSPVIDKIYVDAYQPFSEQKISMQEALDKGAQPLR
AFMLRQTREADLALFARLANSGPLQGPEAVPMRILLPAYVTSELK
TAFQIGFTIFIPFLIIDLVIASVLMALGMMMVPPATIALPFKLML
FVLVDGWQLLMGSLAQSFYS
fliQ, WP_000187355.1
>WP_000187355.1 MULTISPECIES: flagellar
biosynthesis protein FliQ [Salmonella]
(SEQ ID NO: 27)
MTPESVMMMGTEAMKVALALAAPLLLVALITGLIISILQAATQIN
EMTLSFIPKIVAVFIAIIVAGPWMLNLLLDYVRTLFSNLPYIIG
fliR, WP_000616953.1
>WP_000616953.1 MULTISPECIES: flagellar type
III secretion system protein FliR [Salmonella]
(SEQ ID NO: 28)
MIQVTSEQWLYWLHLYFWPLLRVLALISTAPILSERAIPKRVKLG
LGIMITLVIAPSLPANDTPLFSIAALWLAMQQILIGIALGFTMQF
AFAAVRTAGEFIGLQMGLSFATFVDPGSHLNMPVLARIMDMLAML
LFLTFNGHLWLISLLVDTFHTLPIGSNPVNSNAFMALARAGGLIF
LNGLMLALPVITLLLTLNLALGLLNRMAPQLSIFVIGFPLTLTVG
IMLMAALMPLIAPFCEHLFSEIFNLLADIVSEMPINNNP
fliG, WP_000067735.1
>WP_000067735.1 MULTISPECIES: flagellar
motor switch protein FliG [Salmonella]
(SEQ ID NO: 29)
MSNLSGTDKSVILLMTIGEDRAAEVFKHLSTREVQALSTAMANVR
QISNKQLTDVLSEFEQEAEQFAALNINANEYLRSVLVKALGEERA
SSLLEDILETRDTTSGIETLNFMEPQSAADLIRDEHPQIIATILV
HLKRSQAADILALFDERLRHDVMLRIATFGGVQPAALAELTEVLN
GLLDGQNLKRSKMGGVRTAAEIINLMKTQQEEAVITAVREFDGEL
AQKIIDEMFLFENLVDVDDRSIQRLLQEVDSESLLIALKGAEPPL
REKFLRNMSQRAADILRDDLANRGPVRLSQVENEQKAILLIVRRL
AETGEMVIGSGEDTYV
fliH, WP_000064163.1
>WP_000064163.1 MULTISPECIES: flagellar
assembly protein FliH [Salmonella]
(SEQ ID NO: 30)
MSNELPWQVWTPDDLAPPPETFVPVEADNVTLTEDTPEPELTAEQ
QLEQELAQLKIQAHEQGYNAGLAEGRQKGHAQGYQEGLAQGLEQG
QAQAQTQQAPIHARMQQLVSEFONTLDALDSVIASRLMQMALEAA
RQVIGQTPAVDNSALIKQIQQLLQQEPLFSGKPQLRVHPDDLQRV
EEMLGATLSLHGWRLRGDPTLHHGGCKVSADEGDLDASVATRWQE
LCRLAAPGVL
fliI, WP_000213257.1
>WP_000213257.1 MULTISPECIES: flagellum-
specific ATP synthase FliI [Salmonella]
(SEQ ID NO: 31)
MTTRLTRWLTALDNFEAKMALLPAVRRYGRLTRATGLVLEATGLO
LPLGATCIIERQDGPETKEVESEVVGFNGQRLFLMPLEEVEGILP
GARVYARNGHGDGLQSGKQLPLGPALLGRVLDGGGKPLDGLPAPD
TLETGALITPPFNPLQRTPIEHVLDTGVRAINALLTVGRGQRMGL
FAGSGVGKSVLLGMMARYTRADVIVVGLIGERGREVKDFIENILG
PDGRARSVVIAAPADVSPLLRMQGAAYATRIAEDFRDRGQHVLLI
MDSLTRYAMAQREIALAIGEPPATKGYPPSVFAKLPALVERAGNG
IHGGGSITAFYTVLTEGDDQQDPIADSARAILDGHIVLSRRLAEA
GHYPAIDIEASISRAMTALITEQHYARVRLFKQLLSSFQRNRDLV
SVGAYAKGSDPMLDKAITLWPQLEAFLQQGIFERADWEDSLQALD
LIFPTV
fliT, WP_000204899.1
>WP_000204899.1 MULTISPECIES: flagella
biosynthesis regulatory protein FliT [Salmonella]
(SEQ ID NO: 32)
MTSTVEFINRWQRIALLSQSLLELAQRGEWDLLLQQEVSYLQSIE
TVMEKQTPPGITRSIQDMVAGYIKQTLDNEQLLKGLLQQRLDELS
SLIGQSTRQKSLNNAYGRLSGMLLVPDAPGAS
fliD, WP_000146802.1
>WP_000146802.1 MULTISPECIES: flagellar
filament capping protein FliD [Salmonella]
(SEQ ID NO: 33)
MASISSLGVGSNLPLDQLLTDLTKNEKGRLTPITKQQSANSAKLT
AYGTLKSALEKFQTANTALNKADLFKSTVASSTTEDLKVSTTAGA
AAGTYKINVTQLAAAQSLATKTTFATTKEQLGDTSVTSRTIKIEQ
PGRKEPLEIKLDKGDTSMEAIRDAINDADSGIAASIVKVKENEFQ
LVLTANSGTDNTMKITVEGDTKLNDLLAYDSTTNTGNMQELVKAE
NAKLNVNGIDIERQSNTVTDAPQGITLTLTKKVTDATVTVTKDDT
KAKEAIKSWVDAYNSLVDTFSSLTKYTAVEPGEEASDKNGALLGD
SVVRTIQTGIRAQFANSGSNSAFKTMAEIGITQDGTSGKLKIDDD
KLTKVLKDNTAAARELLVGDGKETGITTKIATEVKSYLADDGIID
NAQDNVNATLKSLTKQYLSVSNSIDETVARYKAQFTQLDTMMSKL
NNTSSYLTQQFTAMNKS
fliC, WP_000079805.1
>WP_000079805.1 MULTISPECIES: FliC/FljB
family flagellin [Salmonella]
(SEQ ID NO: 34)
[sequence omitted]
fljB, WP_000079794.1
>WP_000079794.1 MULTISPECIES: FliC/FljB
family flagellin [Salmonella]
(SEQ ID NO: 35)
MAQVINTNSLSLLTQNNLNKSQSALGTAIERLSSGLRINSAKDDA
AGQAIANRFTANIKGLTQASRNANDGISIAQTTEGALNEINNNLQ
RVRELAVQSANSTNSQSDLDSIQAEITQRLNEIDRVSGQTQFNGV
KVLAQDNTLTIQVGANDGETIDIDLKQINSQTLGLDSLNVQKAYD
VKDTAVTTKAYANNGTTLDVSGLDDAAIKAATGGTNGTASVTGGA
VKFDADNNKYFVTIGGFTGADAAKNGDYEVNVATDGTVTLAAGAT
KTTMPAGATTKTEVQELKDTPAVVSADAKNALIAGGVDATDANGA
ELVKMSYTDKNGKTIEGGYALKAGDKYYAADYDEATGAIKAKTTS
YTAADGTTKTAANQLGGVDGKTEVVTIDGKTYNASKAAGHDFKAQ
PELAEAAAKTTENPLQKIDAALAQVDALRSDLGAVQNRFNSAITN
LGNTVNNLSEARSRIEDSDYATEVSNMSRAQILQQAGTSVLAQAN
QVPQNVLSLLR
flgN, WP_000197547.1
>WP_000197547.1 MULTISPECIES: flagella
biosynthesis chaperone FlgN [Salmonella]
(SEQ ID NO: 36)
MTRLSEILDQMTTVLNDLKTVMDAEQQQLSVGQINGSQLQRITEE
KSSLLATLDYLEQQRRLEQNAQRSANDDIAERWQAITEKTQHLRD
LNQHNGWLLEGQIERNQQALEVLKPHQEPTLYGADGQTSVSHRGG
KKISI
flgM, WP_000020893.1
>WP_000020893.1 MULTISPECIES: anti-sigma-28
factor FlgM [Salmonella]
(SEQ ID NO: 37)
MSIDRTSPLKPVSTVQTRETSDTPVQKTRQEKTSAATSASVTLSD
AQAKLMQPGVSDINMERVEALKTAIRNGELKMDTGKIADSLIREA
QSYLQSK
flgA, WP_001194082.1
>WP_001194082.1 MULTISPECIES: flagellar basal
body P-ring formation protein FlgA
[Salmonella]
(SEQ ID NO: 38)
MQTLKRGFAVAALLFSPLTMAQDINAQLTTWFSQRLAGFSDEVVV
TLRSSPNLLPSCEQPAFSMTGSAKLWGNVNVVARCANEKRYLQVN
VQATGNYVAVAAPIARGGKLTPANVTLKRGRLDQLPPRTVLDIRQ
IQDAVSLRDLAPGQPVQLTMIRQAWRVKAGQRVQVIANGEGFSVN
AEGQAMNNAAVAQNARVRMTSGQIVSGTVDSDGNILINL
flgB, WP_000887043.1
>WP_000887043.1 MULTISPECIES: flagellar
basal body rod protein FlgB [Salmonella]
(SEQ ID NO: 39)
MLDRLDAALRFQQEALNLRAQRQEILAANIANADTPGYQARDIDF
ASELKKVMVRGREETGGVALTLTSSHHIPAQAVSSPAVDLLYRVP
DQPSLDGNTVDMDRERTQFADNSLKYQMGLTVLGSQLKGMMNVLQ
GGN
flgC, WP_001196448.1
>WP_001196448.1 MULTISPECIES: flagellar
basal body rod protein FlgC [Salmonella]
(SEQ ID NO: 40)
MALLNIFDIAGSALAAQSKRLNVAASNLANADSVTGPDGQPYRAK
QVVFQVDAAPGQATGGVKVASVIESQAPEKLVYEPGNPLADANGY
VKMPNVDVVGEMVNTMSASRSYQANIEVLNTVKSMMLKTLTLGQ
flgD, WP_000020450.1
>WP_000020450.1 MULTISPECIES: flagellar
hook assembly protein FlgD [Salmonella]
(SEQ ID NO: 41)
MSIAVNMNDPTNTGVKTTTGSGSMTGSNAADLQSSFLTLLVAQLK
NQDPTNPLONNELTTQLAQISTVSGIEKLNTTLGAISGQIDNSQS
LQATTLIGHGVMVPGTTILAGKGAEEGAVTSTTPFGVELQQPADK
VTATITDKDGRVVRTLEIGELRAGVHTFTWDGKQTDGTTVPNGSY
NIAITASNGGTQLVAQPLQFALVQGVTKGSNGNLLDLGTYGTTTL
DEVRQII
flgE, WP_000010567.1
>WP_000010567.1 MULTISPECIES: flagellar
hook protein FlgE [Salmonella]
(SEQ ID NO: 42)
MSFSQAVSGLNAAATNLDVIGNNIANSATYGFKSGTASFADMFAG
SKVGLGVKVAGITQDFTDGTTTNTGRGLDVAISQNGFFRLVDSNG
SVFYSRNGQFKLDENRNLVNMQGMQLTGYPATGTPPTIQQGANPA
PITIPNTLMAAKSTTTASMQINLNSTDPVPSKTPFSVSDADSYNK
KGTVTVYDSQGNAHDMNVYFVKTKDNEWAVYTHDSSDPAATAPTT
ASTTLKFNENGILESGGTVNITTGTINGATAATFSLSFLNSMQQN
TGANNIVATNQNGYKPGDLVSYQINNDGTVVGNYSNEQEQVLGQI
VLANFANNEGLASQGDNVWAATQASGVALLGTAGSGNFGKLTNGA
LEASNVDLSKELVNMIVAQRNYQSNAQTIKTQDQILNTLVNLR
flgF, WP_000349278.1
>WP_000349278.1 MULTISPECIES: flagellar
basal body rod protein FlgF [Salmonella]
(SEQ ID NO: 43)
MDHAIYTAMGAASQTLNQQAVTASNLANASTPGFRAQLNALRAVP
VDGLSLATRTLVTASTPGADMTPGQLDYTSRPLDVALQQDGWLVV
QAADGAEGYTRNGNIQVGPTGQLTIQGHPVIGEGGPITVPEGSEI
TIAADGTISALNPGDPPNTVAPVGRLKLVKAEGNEVQRSDDGLFR
LTAEAQAERGAVLAADPSIRIMSGVLEGSNVKPVEAMTDMIANAR
RFEMQMKVITSVDENEGRANQLLSMS
flgG, WP_000625851.1
>WP_000625851.1 MULTISPECIES: flagellar
basal-body rod protein FlgG [Salmonella]
(SEQ ID NO: 44)
MISSLWIAKTGLDAQQTNMDVIANNLANVSTNGFKRQRAVFEDLL
YQTIRQPGAQSSEQTTLPSGLQIGTGVRPVATERLHSQGNLSQTN
NSKDVAIKGQGFFQVMLPDGTSAYTRDGSFQVDQNGQLVTAGGFQ
VQPAITIPANALSITIGRDGVVSVTQQGQAAPVQVGQLNLTTFMN
DTGLESIGENLYIETQSSGAPNESTPGLNGAGLLYQGYVETSNVN
VAEELVNMIQVQRAYEINSKAVSTTDQMLOKLTQL
flgH, WP_001174897.1
>WP_001174897.1 MULTISPECIES: flagellar
basal body L-ring protein FlgH [Salmonella]
(SEQ ID NO: 45)
MQKYALHAYPVMALMVATLTGCAWIPAKPLVQGATTAQPIPGPVP
VANGSIFQSAQPINYGYQPLFEDRRPRNIGDTLTIVLQENVSASK
SSSANASRDGKTSFGFDTVPRYLQGLFGNSRADMEASGGNSFNGK
GGANASNTFSGTLTVTVDQVLANGNLHVVGEKQIAINQGTEFIRF
SGVVNPRTISGSNSVPSTQVADARIEYVGNGYINEAQNMGWLQRF
FLNLSPM
flgI, WP_001518955.1
>WP_001518955.1 MULTISPECIES: flagellar
basal body P-ring protein FlgI [Salmonella]
(SEQ ID NO: 46)
MFKALAGIVLALVATLAHAERIRDLTSVQGVRENSLIGYGLVVGL
DGTGDQTTQTPFTTQTLNNMLSQLGITVPTGTNMQLKNVAAVMVT
ASYPPFARQGQTIDVVVSSMGNAKSLRGGTLLMTPLKGVDSQVYA
LAQGNILVGGAGASAGGSSVQVNQLNGGRITNGAIIERELPTQFG
AGNTINLOLNDEDFTMAQQITDAINRARGYGSATALDARTVQVRV
PSGNSSQVRFLADIQNMEVNVTPQDAKVVINSRTGSVVMNREVTL
DSCAVAQGNLSVTVNRQLNVNQPNTPFGGGQTVVTPQTQIDLRQS
GGSLQSVRSSANLNSVVRALNALGATPMDLMSILQSMQSAGCLRA
KLEII
flgJ, WP_000578692.1
>WP_000578692.1 MULTISPECIES: flagellar
assembly peptidoglycan hydrolase FlgJ
[Salmonella]
(SEQ ID NO: 47)
MIGDGKLLASAAWDAQSLNELKAKAGQDPAANIRPVARQVEGMFV
QMMLKSMREALPKDGLFSSDQTRLYTSMYDQQIAQQMTAGKGLGL
ADMMVKQMTSGQTMPADDAPQVPLKFSLETVNSYQNQALTQLVRK
AIPKTPDSSDAPLSGDSKDFLARLSLPARLASEQSGVPHHLILAQ
AALESGWGQRQILRENGEPSYNVFGVKATASWKGPVTEITTTEYE
NGEAKKVKAKFRVYSSYLEALSDYVALLTRNPRYAAVTTAATAEQ
GAVALQNAGYATDPNYARKLTSMIQQLKAMSEKVSKTYSANLDNL
F
flgK, WP_000096425.1
>WP_000096425.1 MULTISPECIES: flagellar
hook-associated protein FlgK [Salmonella]
(SEQ ID NO: 48)
MSSLINHAMSGLNAAQAALNTVSNNINNYNVAGYTRQTTILAQAN
STLGAGGWIGNGVYVSGVQREYDAFITNQLRGAQNQSSGLTTRYE
QMSKIDNLLADKSSSLSGSLQSFFTSLQTLVSNAEDPAARQALIG
KAEGLVNQFKTTDQYLRDQDKQVNIAIGSSVAQINNYAKQIANLN
DQISRMTGVGAGASPNDLLDQRDQLVSELNKIVGVEVSVQDGGTY
NLTMANGYTLVQGSTARQLAAVPSSADPTRTTVAYVDEAAGNIEI
PEKLLNTGSLGGLLTFRSQDLDQTRNTLGQLALAFADAFNAQHTK
GYDADGNKGKDFFSIGSPVVYSNSNNADKTVSLTAKVVDSTKVQA
TDYKIVFDGTDWQVTRTADNTTFTATKDADGKLEIDGLKVTVGTG
AQKNDSFLLKPVSNAIVDMNVKVTNEAEIAMASESKLDPDVDTGD
SDNRNGQALLDLQNSNVVGGNKTFNDAYATLVSDVGNKTSTLKTS
STTQANVVKQLYKQQQSVSGVNLDEEYGNLQRYQQYYLANAQVLQ
TANALFDALLNIR
flgL WP_001223033.1
>WP 001223033.1 MULTISPECIES: flagellar
hook-associated protein FlgL [Salmonella]
(SEQ ID NO: 49)
MRISTQMMYEQNMSGITNSQAEWMKLGEQMSTGKRVTNPSDDPIA
ASQAVVLSQAQAQNSQYALARTFATQKVSLEESVLSQVTTAIQTA
QEKIVYAGNGTLSDDDRASLATDLQGIRDQLMNLANSTDGNGRYI
FAGYKTEAAPFDQATGGYHGGEKSVTQQVDSARTMVIGHTGAQIF
NSITSNAVPEPDGSDSEKNLFVMLDTAIAALKTPVEGNNVEKEKA
AAAIDKTNRGLKNSLNNVLTVRAELGTQLSELSTLDSLGSDRALG
QKLQMSNLVDVDWNSVISSYVMQQAALQASYKTFTDMQGMSLFQL
NR

### II. Vectors/Plasmids

[0115] In the present compositions and/or methods, DNA, RNA (e.g., a nucleic acid-based gene interfering agent) or protein may be produced by recombinant methods. The nucleic acid is inserted into a replicable vector for expression. Many such vectors are available. The vector components generally include, but are not limited to, one or more of the following: an origin of replication, one or more marker genes, an enhancer element, a promoter, and a transcription termination sequence and coding sequence. In some embodiments, for example in the utilization of bacterial delivery agents such as Salmonella, the gene and/or promoter (a sequence of interest) may be integrated into the host cell chromosome or may be presented on, for example, a plasmid/vector.

[0116] Expression vectors usually contain a selection gene, also termed a selectable marker. This gene encodes a protein necessary for the survival or growth of transformed host cells grown in a selective culture medium. Host cells not transformed with the vector containing the selection gene will not survive in the culture medium. Typical selection genes encode proteins that (a) confer resistance to antibiotics or other toxins, e.g., ampicillin, neomycin, methotrexate, or tetracycline, (b) complement auxotrophic deficiencies, or (c) supply critical nutrients not available from complex media.

[0117] Expression vectors can contain a promoter that is recognized by the host organism and is operably linked to the nucleic acid sequence, such as a nucleic acid sequence coding for an open reading frame. Promoters are untranslated sequences located upstream (5′) to the start codon of a structural gene (generally within about 100 to 1000 bp) that control the transcription of particular nucleic acid sequence to which they are operably linked. In bacterial cells, the region controlling overall regulation can be referred to as the operator. Promoters typically fall into two classes, inducible and constitutive. Inducible promoters are promoters that initiate increased levels of transcription from DNA under their control in response to some change in culture conditions, e.g., the presence or absence of a nutrient or a change in temperature. A large number of promoters recognized by a variety of potential host cells are well known.

[0118] Promoters suitable for use with prokaryotic hosts include the β-lactamase and lactose promoter systems, alkaline phosphatase, a tryptophan (trp) promoter system, hybrid promoters such as the tac promoter, and starvation promoters (Matin, A. (1994) Recombinant DNA Technology II, Annals of New York Academy of Sciences, 722:277-291). However, other known bacterial promoters are also suitable. Such nucleotide sequences have been published, thereby enabling a skilled worker to operably ligate them to a DNA coding sequence. Promoters for use in bacterial systems also can contain a Shine-Dalgarno (S.D.) sequence operably linked to the coding sequence.

[0119] Construction of suitable vectors containing one or more of the above-listed components employs standard ligation techniques. Isolated plasmids or DNA fragments are cleaved, tailored, and re-ligated in the form desired to generate the plasmids required.

[0120] In some embodiments of the invention, the expression vector is a plasmid or bacteriophage vector suitable for use in Salmonella, and the DNA, RNA and/or protein is provided to a subject through expression by an engineered Salmonella (in one aspect attenuated) administered to the patient. The term “plasmid” as used herein refers to any nucleic acid encoding an expressible gene and includes linear or circular nucleic acids and double or single stranded nucleic acids. The nucleic acid can be DNA or RNA and may comprise modified nucleotides or ribonucleotides and may be chemically modified by such means as methylation or the inclusion of protecting groups or cap- or tail structures.

[0121] One embodiment provides a Salmonella strain comprising a lysis gene or cassette operably linked to an intracellularly induced Salmonella promoter. In one embodiment, the promoter is a promoter for one of the genes in Salmonella pathogenicity island 2 type III secretion system (SPI2-T3SS) selected from the group SpiC/SsaB (accession no. CBW17423.1), SseF (accession no. CBW17434.1), SseG (accession no. CBW17435.1), SseI (accession no. CBW17087.1), SseJ (accession no. CBW17656.1 or NC_016856.1), SseK1 (accession no. CBW20184.1), SseK2 (accession no. CBW18209.1), SifA (accession no. CBW17257.1), SifB (accession no. CBW17627.1), PipB (accession no. CBW17123.1), PipB2 (accession no. CBW18862.1), SopD2 (accession no. CBW17005.1), GogB (accession no. CBW18646.2), SseL (accession no. CBW18358.1), SteC (accession no. CBW17723.1), SspH (accession no. STM4_1483), SspH2 (accession no. CBW18313.1), or SirP (examples/an embodiment of sequences that can be used in the instant compositions/methods are provided for by accession numbers and sequences provided throughout the specification; other sequences, including those with greater than about 80%, 85%, 90%, 95%, 96%, 97%, 98%, 99% and 100% identity may also be used in the composition/methods of the invention).

```
SpiC/SsaB (accession no. CBW17423.1):
(SEQ ID NO: 50)
    1 mseegfmlav lkgipliqdi raegnsrswi mtidghparg eifseafsis lflndleslp
  61 kpclayvtll laahpdvhdy aiqltadggw lngyyttsss seliaieiek hlaltcilkn
121 virnhhklys ggv
SseF (accession no. CBW17434.1):
(SEQ ID NO: 51)
    1 mkihipsaas nivdgnspps diqakevsip ppeipapgtp aapvlltpeq irqqrdyaih
  61 fmqytiralg atvvfglsva aavisggagl piailagaal viaigdacca yhnyqsicqq
121 keplqtasds valvvsalal kcgaslncan tlanclslli rsgiaismlv lplqfplpaa
181 eniaasldmg svitsvslta igavldycla rpsgddqens vdelhadpsv llaeqmaalc
241 qsattpalmd ssdhtsrgep
SseG (accession no. CBW17435.1):
(SEQ ID NO: 52)
    1 mkpvspnaqv ggqrpvnape esppcpslph petnmesgri gpqqgkervl aglakrviec
  61 fpkeifswqt vilggqilcc sagialtvls gggaplvala giglaiaiad vacliyhhkh
121 hlpmahdsig navfyiancf anqrksmaia kavslggrla ltatvmthsy wsgslglqph
181 llerlndity glmsftrfgm dgmamtgmqv ssplyrllaq vtpeqrape
SseI (accession no. CBW17087.1):
(SEQ ID NO: 53)
    1 mpfhigsgcl paiisnrriy riawsdtppe msswekmkef fcsthqaeal eciwtichpp
  61 agttredvvs rfellrtlay dgweenihsg lhgenyfcil dedsqeilsv tlddvgnytv
121 ncqgysethh ltmatepgve rtditynlts didaaaylee lkqnpiinnk imnpvgqces
181 lmtpvsnimn ekgfdniryr gifiwdkpte eiptnhfavv gnkegkdyvf dvsahqfenr
241 gmsnlngpli lsadewvcky rmatrrkliy ytdfsnssia anaydalpre lesesmagkv
301 fvtsprwint fkkqkyslig km
SseJ (accession no. CBW17656.1):
(SEQ ID NO: 54)
    1 mplsvgqgyf tssissekin aikesarlpe lslwekikay fftthhaeal ecifnlyhhq
  61 elnltpvqvr gayiklrala sqgckeqfii esqehadkli ikddngenil sievechpea
121 fglakeinks hpkpknislg ditrlvffgd slsdslgrmf ekthhilpsy gqyfggrftn
181 gftwteflss phflgkemln faeggstsas yscincigdf vsntdrqvas ytpshqdlai
241 fllgandymt lhkdnvimvv eqqiddieki isggvnnvlv mgipdlsltp ygkhsdekrk
301 lkdesiahna llktnveelk ekypqhkicy yetadafkvi meaasnigyd tenpythhgy
361 vhvpgakdpq ldicpqyvfn dlvhptqevh hcfaimlesf iahhyste
SseJ sequence (DNA)-Accession number-NCBI Reference Sequence: NC_016856.1
(SEQ ID NO: 55)
ATGCCATTGAGTGTTGGACAGGGTTATTTCACATCATCTATCAGTTCTGAAAAATTTAATGCGATAAAAGAAAGCGC
ACGCCTTCCGGAATTAAGTTTATGGGAGAAAATCAAAGCATATTTCTTTACCACCCACCATGCAGAGGCGCTCGAAT
GTATCTTTAATCTTTACCACCATCAGGAACTGAATCTAACACCGGTACAGGTTCGCGGAGCCTACATCAAACTTCGA
GCCTTAGCGTCTCAGGGATGTAAAGAACAGTTTATTATAGAATCACAGGAACACGCCGATAAGTTGATTATTAAAGA
TGATAATGGTGAAAATATTTTGTCTATTGAGGTTGAATGTCATCCGGAAGCTTTTGGTCTTGCAAAAGAAATCAATA
AATCACATCCCAAGCCCAAAAATATTTCTTTGGGTGATATTACCAGACTGGTATTTTTTGGCGACAGCTTGTCTGAC
TCCTTAGGGCGTATGTTTGAAAAAACACATCATATCTTACCCTCCTATGGTCAATACTTTGGCGGAAGGTTTACTAA
TGGATTTACCTGGACTGAGTTTTTATCATCTCCACACTTCTTAGGTAAAGAGATGCTTAATTTTGCTGAAGGGGGAA
GTACATCGGCAAGCTATTCCTGCTTTAATTGCATCGGTGACTTTGTATCAAATACGGACAGACAAGTCGCATCTTAC
ACCCCTTCTCACCAGGACCTGGCGATATTTTTATTGGGGGCTAATGACTATATGACACTACACAAAGATAATGTAAT
AATGGTCGTTGAGCAACAAATTGATGATATTGAAAAAATAATTTCCGGTGGAGTTAATAATGTTCTGGTCATGGGGA
TTCCCGATTTGTCTTTAACACCTTATGGCAAACATTCTGATGAAAAAAGAAAGCTTAAGGATGAAAGCATCGCTCAC
AATGCCCTGTTAAAAACTAATGTTGAAGAATTAAAAGAAAAATACCCCCAGCATAAAATATGCTATTACGAGACTGC
CGATGCATTTAAGGTGATAATGGAGGCGGCCAGTAATATTGGTTATGATACGGAAAACCCTTATACTCACCACGGCT
ATGTACATGTTCCCGGGGCTAAAGACCCTCAGCTAGATATATGTCCGCAATACGTCTTCAACGACCTTGTCCATCCA
ACCCAGGAAGTCCATCATTGTTTTGCCATAATGTTAGAAAGTTTTATAGCTCATCATTATTCCACTGAATAA
SseJ sequence (protein)
(SEQ ID NO: 56)
MPLSVGQGYFTSSISSEKFNAIKESARLPELSLWEKIKAYFFTTHHAEALECIFNLYHHQE
LNLTPVQVRGAYIKLRALASQGCKEQFIIESQEHADKLIIKDDNGENILSIEVECHPEAFG
LAKEINKSHPKPKNISLGDITRLVFFGDSLSDSLGRMFEKTHHILPSYGQYFGGRFTNGFT
WTEFLSSPHFLGKEMLNFAEGGSTSASYSCFNCIGDFVSNTDRQVASYTPSHQDLAIFLLG
ANDYMTLHKDNVIMVVEQQIDDIEKIISGGVNNVLVMGIPDLSLTPYGKHSDEKRKLKDES
IAHNALLKTNVEELKEKYPQHKICYYETADAFKVIMEAASNIGYDTENPYTHHGYVHVPGA
KDPQLDICPQYVFNDLVHPTQEVHHCFAIMLESFIAHHYSTE
SseK1 (accession no. CBW20184.1):
(SEQ ID NO: 57)
    1 mipplnryvp alsknelvkt vtnrdiqfts fngkdyplcf ldektpllfq wfernparfg
  61 kndipiinte knpylnniik aatiekerli gifvdgdffp gqkdafskle ydyenikviy
121 rndidfsmyd kklseiymen iskqesmpee krdchllqll kkelsdiqeg ndsliksyll
181 dkghgwfdfy rnmamlkagq lfleadkvgc ydlstnsgci yldadmiite klggiyipdg
241 iavhveridg rasmengiia vdrnnhpall agleimhtkf dadpysdgvc ngirkhfnys
301 lnedynsfcd fiefkhdnii mntsqftqss warhvq
SseK2 (accession no. CBW18209.1):
(SEQ ID NO: 58)
    1 marfnaaftr ikimfsrirg liscqsntqt iaptlsppss ghvsfagidy pllplnhqtp
  61 lvfqwfernp drfgqneipi intqknpyln niinaaiiek eriigifvdg dfskgqrkal
121 gkleqnyrni kviynsdlny smydkkltti ylenitklea qsaserdevl lngvkksled
181 vlknnpeetl isshnkdkgh lwfdfyrnlf llkgsdafle agkpgchhlq pgggciylda
241 dmlltdklgt lylpdgiaih vsrkdnhvsl engiiavnrs ehpalikgle imhskpygdp
301 yndwlskglr hyfdgshiqd ydafcdfief kheniimnts sltasswr
SifA (accession no. CBW17257.1):
(SEQ ID NO: 59)
    1 mpitigngfl kseiltnspr ntkeawwkvl wekikdfffs tgkakadrcl hemlfaerap
  61 trerlteiff elkelacasq rdrfqvhnph endatiilri mdqneenell ritqntdtfs
121 cevmgnlyfl mkdrpdilks hpqmtamikr ryseivdypl pstlclnpag apilsvpldn
181 iegylytelr kghldgwkaq ekatylaaki qsgiekttri lhhanisest qqnafletma
241 mcglkqleip pphthipiek mvkevlladk tfqaflvtdp stsqsmlaei veaisdqvfh
301 aifridpqai qkmaeeqltt lhvrseqqsg clccfl
SifB (accession no. CBW17627.1):
(SEQ ID NO: 60)
    1 mpitigrgfl ksemfsqsai sqrsfftllw ekikdffcdt qrstadqyik elcdvasppd
  61 aqrlidlfck lyelsspser gnfhfqhykd aecqytnlci kdgediplci mirqdhyyye
121 imnrtvlcd tqsahlkrys dinikastyv ceplcclipe rlqlslsggi tfsvdlknie
181 etliamaekg nlcdwkeger kaaissrinl giaqagvtai ddaiknkiaa kvientnlkn
241 aafepnyaqs svtqivyscl fkneilmnml eessshgllc lnelteyvtl qvhnslfsed
301 lsslvettkn eahhqs
PipB (accession no. CBW17123.1):
(SEQ ID NO: 61)
    1 mpitnaspen ilrylhaagt gtkeamksat sprgilewfv nfftcggvrr snerwfrevi
  61 gklttsllyv nknaffdgnk ifledvngct iclscgaase ntdpmviiev nkngktvtdk
121 vdserfwnvc rmlklmskhn iqqpdslite dgflnlrgvn lahkdfqged lskidasnad
181 frettlsnvn lvganlccan lhavnimgsn mtkanlthad ltcanmsgvn ltaailfgsd
241 ltdtklngak ldkialtlak altgadltgs qhtptplpdy ndrtlfphpi f
PipB2 (accession no. CBW18862.1):
(SEQ ID NO: 62)
    1 mersldslag maksafgagt saamrqatsp ktileyiinf ftcggirrrn etqyqeliet
  61 maetlkstmp drgaplpeni ilddmdgorv efnlpgenne agqvivrvsk gdhsetreip
121 lasfekicra llfrcefslp qdsviltaqg gmnlkgavlt ganltsenlc dadlsganle
181 gavlfmadce ganfkganls gtslgdsnfk nacledsimc gatldhanlt ganlqhasll
241 gcsmiecncs ganmdhtnls gatliradms gatlqgatim aaimegavlt ranlrkasfi
301 stnldgadla eanlnntcfk dctltdlrte datmststqt lfnefyseni
SopD2 (accession no. CBW17005.1):
(SEQ ID NO: 63)
    1 mpvtlsfgnr hnyeinhsrl arlmspdkee alymgvwdrf kdcfrthkkq evlevlytli
  61 hgcerenqae lnvditgmek ihaftqlkey anpsqqdrfv mrfdmnqtqv lfeidgkvid
121 kcnlhrllnv sencifkvme edeeelflki cikygekisr ypellegfan klkdavnedd
181 dvkdevyklm rsgedrkmec vewngtltee eknklrclqm gsfnittqff kigywelege
241 vlfdmvhptl syllqaykps lssdlietnt mlfsdvlnkd yddyqnnkre idailrriyr
301 shnntlfise ksscrnmli
GogB (accession no. CBW18646.2):
(SEQ ID NO: 64)
    1 mqyaytsnea tsnlellnkw riespdieke ernsiydkii eanhtgslsi tahhvtsipv
  61 fpdnlselnl sscytlesip nlpdglkslt isgnqtikis yfpdslesls idmqayeeny
121 tfpalpyglk sftacygkfl pplpphlssl slqnfseilc aelpykldkl dlqncpflpl
181 mkmlpeelke lsielirtvp gtviddilpd klkklsinfc dniklpvklp vnlksinlss
241 rtpiaweipt cnlpahidis tdgyvklnpe fltrsditfs nkpagdvlsf qpgdvvyglc
301 kardrvntlv nslyyfskkd iiiqntltda vwdrknravf nkdekiaerl ndvqrgiffr
361 eflsqhkkyn itedkysdls neecwiktsk aglefqtrlr ersvifvidn lvdaisdian
421 ktgkhgnsit ahelrwvyrn rhddlvkqnv kfflngeais hedvfslvgw dkykpknrnr
SseL (accession no. CBW18358.1):
(SEQ ID NO: 65)
    1 msdealtllf savengdqnc idllenlalr nddlghrvek flfdlfsgkr tgssdidkki
  61 nqaclvlhqi annditkdnt ewkklhapsr llymagsatt dlskkigiah kimgdqfaqt
121 dqeqvgvenl wcgarmlssd elaaatqglv qespllsvny piglihpttk enilstqlle
181 kiaqsglshn evilvntgdh wllolfykla ekikclifnt yydlnentkq eiieaakiag
241 isesdevnfi emnlqnnvpn goglfcyhti qllsnagqnd pattlrefae nfltlsveeq
301 alfntqtrrq iyeyslq
SteC (accession no. CBW17723.1):
(SEQ ID NO: 66)
    1 mpftfqignh scqiserylr diidnkrehv fstcekfidf frniftrrsl isdyreiynl
  61 lcqkkehpdi kgpfspgpfs krdedctrwr pllgyiklid asrpetidky tvevlahqen
121 mlllqmfydg vlvtetecse rcvdflketm fnynngeitl aalgndnlpp seagsngiye
181 afeqrlidfl ttpatasgye sgaidqtdas qpaaieafin spefqknirm rdieknkigs
241 gsygtvyrlh ddfvvkipvn ergikvdvns pehrnchpdr vskylnmand dknfsrsaim
301 ningkdvtvl vskyiqgqef dvedednyrm aeallksrgv ymhdinilgn ilvkegvlff
361 vdgdqivlsq esrqqrsvsl atrqleeqik ahhmiklkra etegntedve yykslitdld
421 aligeeeqtp apgrrfklaa peegtlvakv lkdelkk
SspH1 (accession no. STM14_1483):
(SEQ ID NO: 67)
    1 mfnirntqps vsmqaiagaa apeaspeeiv wekiqvffpq enyeeaqqcl aelchpargm
  61 lpdhissqfa rlkaltfpaw eenigenrdg inqfcildag skeilsitld dagnytvncq
121 gyseahdfim dtepgeecte faegasgtsl rpattvsqka aeydavwskw erdapagesp
181 graavvqemr dolnngnpvl nvgasglttl pdrlpphitt lvipdnnlts lpelpeglre
241 levsgnlqlt slpslpqglq klwaynnwla slptlppglg dlavsnnqlt slpemppalr
301 elrvsgnnlt slpalpsglq klwaynnrlt slpemspglq eldvshnqlt rlpqsltgls
361 saarvyldgn plsvrtlqal rdiighsgir ihfdmagpsv prearalhla vadwltsare
421 geaaqadrwq afglednaaa fslvldrlre tenfkkdagf kaqisswltq laedaalrak
481 tfamateats tcedrvthal hqmnnvqlvh naekgeydnn lqglvstgre mfrlatleqi
541 arekagtlal vddvevylaf qnklkeslel tsvtsemrff dvsgvtvsdl qaaelqvkta
601 ensgfskwil qwgplhsvle rkvperfnal rekqisdyed tyrklydevl kssglvddtd
661 aertigvsam dsakkefldg lralvdevlg syltarwrln
SspH2 (accession no. CBW18313.1):
(SEQ ID NO: 68)
    1 mpfhigsgcl patisnrriy riawsdtppe msswekmkef fcsthqteal eciwtichpp
  61 agttredvin rfellrtlay agweesihsg qhgenyfcil dedsqeilsv tlddagnytv
121 ncqgysethr ltldtaqgee gtghaegasg tfrtsflpat tapqtpaeyd avwsawrraa
181 paeesrgraa vvqkmracln ngnavlnvge sglttlpdel pahittlvip dnnltslpal
241 ppelrtlevs gnqltslpvl ppgllelsif snplthlpal psglcklwif gnqltslpvl
301 ppglqelsvs dnglaslpal pselcklway nnqltslpml psglqelsvs dnqlaslptl
361 pselyklway nnrltslpal psglkelivs gnrltslpvl pselkelmvs gnrltslpml
421 psgllslsvy rnqltripes lihlssettv nlegnplser tlqalreits apgysgpiir
481 fdmagasapr etralhlaaa dwlvparege papadrwhmf gqednadafs lfldrlsete
541 nfikdagfka qisswlaqla edealrantf amateatssc edrvtfflhq mknvqlvhna
601 ekgqydndla alvatgremf rlgkleqiar ekvrtlalvd eievwlayqn klkkslglts
661 vtsemrffdv sgvtvtdlqd aelqvkaaek sefrewilqw gplhrvlerk apervnalre
721 kqisdyeety rmlsdtelrp sglvgntdae rtigarames akktfldglr plveemlgsy
781 lnvqwrrn
```

[0122] In one embodiment, the Salmonella gene under the regulation of an inducible promoter is selected from ftsW (accession no. CBW16230.1), ftsA (accession no. CBW16235.1), ftsZ (accession no. CBW16236.1), murE (accession no. CBW16226.1), mukF (accession no. CBW17025.1), imp (accession no. CBW16196.1), secF (accession no. CBW16503.1), eno (accession no. CBW19030.1), hemH (accession no. CBWJ6582.1), tmk (accession no. CBW17233.1), dxs (accession no. CBW16516.1), uppS (accession no. CBW16324.1), cdsA (accession no. CBW16325.1), accA (accession no. CBWJ6335.1), pssA (accession no. CBW18718.1), msbA (accession no. CBW17017.1), tsf (accession no. CBW16320.1), trmD (accession no. CBW18749.1), cca (accession no. CBW19276.1), inJB (accession no. CBW19355.1), rpoA (accession no. CBW19477.1), rpoB (accession no. CBW20180.1), rpoC (accession no. CBW20181.1), holA (accession no. CBW16734.1), dnaC (accession no. CBW20563.1), or eng (EngA accession no. CBW18582.1; EngB accession no. CBW20039.1).

```
ftsW (accession no. CBW16230.1):
(SEQ ID NO: 69)
      1 mmasrdkdad slimydrtll wltfglaaig fvmvtsasmp vgqrlandpf lfakrdalyi
    61 flafclamvt lrlpmtfwqk ysttmliasi imllivlvvg ssvngasrwi algplriqpa
  121 eftklslicy lanylvrkvd evrnnlrgfl kpmgvilvla villaqpdlg tvvvlfvttl
  181 amlflagakl wqfiaiigmg isavillila epyrirrvts fwnpwedpfg sgyqltqslm
  241 afgrgeiwgq glgnsvqkle ylpeahtdfi faiigeelgy igvvlallmv ffvaframsi
  301 grkaleidhr fsgflacsig iwfsfqalvn vgaaagmlpt kgltlplisy ggssllimst
  361 aimfllridy etrlekaqaf trgsr
ftsA (accession no. CBW16235.1):
(SEQ ID NO: 70)
      1 mikatdrklv vgleigtakv aalvgevlpd gmvniigvgs cpsrgmdkgg vndlesvvkc
    61 vqraidqael madcqissvy lalsgkhisc qneigmvpis eeevtqedve nvvhtaksvr
  121 vrdehrvlhv ipqeyaidyq egiknpvgls gvrmqakvhl itchndmakn ivkavercgl
  181 kvdqlifagl aasysvlted erelgvcvvd igggtmdiav ytggalrhtk vipyagnvvt
  241 sdiayafgtp psdaeaikvr hgcalgsivg kdesvevpsv ggrpprslqr qtlaeviepr
  301 ytellnlvne eilqlqeqlr qqgvkhhlaa givltggaaq ieglaacaqr vfhtqvriga
  361 plnitgltdy aqepyystav gllhygkesh lngeaevekr vtasvgswik rinswlrkef
ftsZ (accession no. CBW16236.1):
(SEQ ID NO: 71)
      1 mfepmeltnd avikvigvgg gggnavehmv reriegveff avntdaqalr ktavgqtiqi
    61 gsgitkglga ganpevgrna adedrealra alegadmvfi aagmgggtgt gaapvvaeva
  121 kdlgiltvav vtkpfnfegk krmafaeqgi telskhvdsl itipndklik vlgrgislld
  181 afgaandvlk gavqgiaeli trpglmnvdf advrtvmsem gyammgsgva sgedraeeaa
  241 emaissplle didlsgargv lvnitagfdl rldefetvgn tirafasdna tvvigtsldp
  301 dmndelrvtv vatgigmdkr peitlvtnkq vqqpvldryq qhgmapltqe qktvakvvnd
  361 ntpqaakepd yldipaflrk qad
murE (accession no. CBW16226.1):
(SEQ ID NO: 72)
      1 madrnlrdll apwvaglpar elremtldsr vaaagdlfva vvghqadgrr yipqaiaqgv
    61 aaiiaeakde asdgeiremh gvpvvylsql nerlsalagr fyhepsenmr lvavtgtngk
  121 ttttqllaqw sqllgetsav mgtvgngllg kviptenttg savdvqhvla slvaqgatfg
  181 amevsshglv qhrvaalkfa asvftnlsrd hldyhgdmah yeaakwmlys thhhgqaivn
  241 addevgrrwl aslpdavavs meghinpnch grwlkaeave yhdrgatirf asswgegeie
  301 srlmgafnvs nlllalatll algypltdll ktaarlqpvc grmevftapg kptvvvdyah
  361 tpdalekalq aarlhcagkl wcvfgcggdr dkgkrplmga iaeefadivv vtddnprtee
  421 praiindila gmldagqvrv megraeavtn aimqakdndv vliagkghed yqivgtqrld
  481 ysdrvtaarl lgvia
mukF (accession no. CBW17025.1):
(SEQ ID NO: 73)
      1 msefsqtvpe lvawarkndf sislpvdrls fllavatlng erldgemseg elvdafrhvs
    61 dafeqtseti gvrannaind mvrqrlinrf tseqaegnai yrltplgigi tdyyirqref
  121 stlrlsmqls ivagelkraa daaaeggdef hwhrnvyapl kysvaeifds idltqrimde
  181 qqqqvkddia qlinkdwraa isscelllse tsgtlrelqd tleaagdklq anllriqdat
  241 mthddlhfvd rlvfdlqskl driiswgqqs idlwigydrh vhkfirtaid mdknrvfaqr
  301 lrqsvqtyfd dpwaltyana drlldmrdee malrddevtg elppdleyee fneireqlaa
  361 iieeqlaiyk trqtpldlgl vvreylaqyp rarhfdvari vidqavrlgv aqadftglpa
  421 kwqpindyga kvqahvidky
imp (accession no. CBW16196.1):
(SEQ ID NO: 74)
      1 mkkriptlla tmiasalysh qglaadlasq cmlgvpsydr plvkgdtndl pvtinadnak
    61 gnypddavft gnvdimqgns rlqadevqlh qkqaegqpep vrtvdalgnv hyddnqvilk
  121 gpkgwanlnt kdtnvwegdy qmvgrqgrgk adlmkqrgen rytilengsf tsclpgsdtw
  181 svvgsevihd reeqvaeiwn arfkvgpvpi fyspylqlpv gdkrrsgfli pnakyttkny
  241 fefylpyywn iapnmdatit phymhrrgni mwenefrylt qagegvmeld ylpsdkvyed
  301 dhpkegdkhr wlfnwqhsgv mdqvwrfnvd ytkvsdssyf ndfdskygss tdgyatqkfs
  361 vgyavqnfda tvstkqfqvf ndqntssysa epqldvnyyh ndlgpfdtri ygqavhfvnt
  421 kdnmpeatrv hleptinlpl snrwgslnte aklmathyqq tnldsynsdp nnknkledsv
  481 nrvmpqfkvd gkliferdma mlapgytqtl eprvqylyvp yrdqsgiyny dssllqsdyn
  541 glfrdrtygg ldriasanqv ttgvttriyd daaverfnvs vgqiyyftes rtgddnikwe
  601 nddktgslvw agdtywrise rwglrsgvqy dtrldsvats sssleyrrdq drlvqlnyry
  661 aspeyiqatl psyystaegy knginqvgav aswpiadrws ivgayyfdtn sskpadqmlg
  721 lqynsccyai rvgyerklng wdndkqhaiy dnaigfniel rglssnyglg tqemlrsnil
  781 pyqssm
secF (accession no. CBW16503.1):
(SEQ ID NO: 75)
      1 mageytveql nhgrkvydfm rwdfwafgis gllliaaivi mgvrgfnwgl dftggtviei
    61 tlekpaemdv mrealqkagy eepqlqnfgs shdimvrmpp tegetggqvl gskvvtiine
  121 atnqnaavkr iefvgpsvga dlaqtgamal lvalisilvy vgfrfewrla agvvialahd
  181 viitlgilsl fhieidltiv aslmsvigys lndsivvsdr irenfrkirr gtpyeifnvs
  241 ltqtlhrtli tsgttlvvil mlylfggpvl egfsltmlig vsigtassiy vasalalklg
  301 mkrehmlqqk vekegadqps ilp
eno (accession no. CBW19030.1):
(SEQ ID NO: 76)
      1 mskivkvigr eiidsrgnpt veaevhlegg fvgmaaapsg astgsreale lrdgdksrfl
    61 gkgvtkavga vngpiagail gkdakdqagi dkimidldgt enksnfgana ilavslanak
  121 aaaaakgmpl yehiaelngt pgkysmpvpm mniinggeha dnnvdigefm iqpvgaktvk
  181 eairmgsevf hhlakvlkgk gmntavgdeg gyapnlgsna ealaviaeav kaagyelgkd
  241 itlamdcaas efykdgkyvl agegnkafts eefthfleel tkqypivsie dgldesdwdg
  301 fayqtkvlgd kiqlvgddlf vtntkilkeg iekgiansil ikfnqigslt etlaaikmak
  361 dagytavish rsgetedati adlavgtaag qiktgsmsrs drvakynqli rieealgeka
  421 pyngrkeikg qa
hemH (accession no. CBW16582.1):
(SEQ ID NO: 77)
      1 mrqtktgill anlgtpdapt peavkrylkq flsdrrvvdt prllwwpllr gvilplrspr
    61 vaklyqsiwm dggsplmvys reqqqalaar lpdtpvalgm sygspslesa vdellasdvd
  121 hivvlplypq yscstvgavw delgrilark rripgisfir dyaddgayid alaksaresf
  181 arhgepdvll lsyhgipqry adegddypqr crdttrelvs alglppekvm mtfqsrfgre
  241 pwltpytdet lkmlgekgtg hiqvmcpgfa adcletleei aeqnreifle aggkkyayip
  301 alnatpehid mmlkltapyr
tmk (accession no. CBW17233.1):
(SEQ ID NO: 78)
      1 mgsnyivieg legagkttar dvvvetleql girnmiftre pggtqlaekl rslvldirsv
    61 gdevitdkae vlmfyaarvq lvetvikpal aqgvwvigdr hdlstqayqg ggrgidqtml
  121 atlrdavlgd frpdltlyld vtpevglkra rargdldrie qesfdffnrt rarylelaaq
  181 dsrirtidat qpldavmrdi ratvtkwvqe qaa
dxs (accession no. CBW16516.1):
(SEQ ID NO: 79)
      1 msfdiakypt lalvdstqel rllpkeslpk lcdelrryll dsvsrssghf asglgtvelt
    61 valhyvyntp fdqliwdvgh qayphkiltg rrdkigtirq kgglhpfpwr geseydvlsv
  121 ghsstsisag igiavaaeke gkdrrtvcvi gdgaitagma feamnhagdi rpdmlvilnd
  181 nemsisenvg alnnhlaqll sgklysslre ggkkvfsgvp pikellkrte ehikgmvvpg
  241 tlfeelgfny igpvdghdvm glistlknmr dlkgpqflhi mtkkgrgyep aekdpitfha
  301 vpkfdpssgc lpkssgglpg yskifgdwlc etaakdsklm aitpamregs gmvefsrkfp
  361 dryfdvaiae qhavtfaagl aiggykpvva iystflqray dqvihdvaiq klpvmfaidr
  421 agivgadgqt hqgafdlsyl rcipdmvimt psdenecrqm lftgyhyndg ptavryprgn
  481 aqgvaltple klpigkglvk rhgeklailn fgtlmpeaak vaealnatlv dmrfvkpldd
  541 tlilemaaqh dalvtleena imggagsgvn evlmahrkpv pvlniglpdf fipqgtqeea
  601 raelgldaag ieakikawla
uppS (accession no. CBW16324.1):
(SEQ ID NO: 80)
      1 mlsatqpvse nlpahgorhv aiimdgngrw akkqgkiraf ghkagaksvr ravsfaanng
    61 idaltlyafs senwnrpage vsalmelfvw aldsevkslh rhnvrlriig disrfnsrlq
  121 erirksealt ahntgltlni aanyggrwdi vqgvrqlaeq vqagvlrpdq ideerlgqqi
  181 cmhelapvdl virtggehri snillwqiay aelyftdvlw pdfdeqdfeg alhafanrer
  241 rfggtepgdd ka
cdsA (accession no. CBW16325.1):
(SEQ ID NO: 81)
      1 mlkyrlisaf vlipaviaal flippvgfai itlvvomlaa wewgqlsgfa arsqrvwlav
    61 lcglllalml fllpeyhhni rqplvemslw aslgwwvval llvlfypgsa aiwrnsktlr
  121 lifglltivp ffwgmlalra whydenhysg aiwllyvmil vwgadsgaym fgklfgkhkl
  181 apkvspgktw qgfigglata aviswgygmw anlnvapvil licsvvaala svlgdltesm
  241 fkreagikds ghlipghggi ldridsltaa vpvfacllll vfrtl
accA (accession no. CBW16335.1):
(SEQ ID NO: 82)
      1 mslnfldfeq piaeleakid sltavsrqde kldinideev hrlreksvel trkifadlga
    61 wqvaqlarhp qrpytldyvr lafdefdela gdrayaddka ivggiarleg rpvmiighqk
  121 gretkekirr nfgmpapegy rkallmema erfnmpiitf idtpgaypgv gaeergqsea
  181 iarnlremsr lnvpvictvi geggsggala igvgdkvnml qystysvisp egcasilwks
  241 adkaplaaea mgiiaprlke lklidsiipe plggahrnpe amaaslkaql ledladldvl
  301 stddlknrry qrlmsygya
pssA (accession no. CBW18718.1):
(SEQ ID NO: 83)
      1 mlskfkrnkh qqhlaqlpki sqsvddvdff ytpatfretl lekiasatqr icivalyleq
    61 ddggkgilda lyaakrqrpe ldvrvlvdwh raqrgrigaa asntnadwyc rlagenpgid
  121 vpvygvpint realgvlhfk gfiiddsvly sgasindvyl hqhdkyrydr yqlirnrqma
  181 dimfdwvtqn lmngrgvnrl dntqrpkspe ikndirlyrq elrdasyhfq gdandeqlsv
  241 tplvglgkss linktifhlm pcaehkltic tpyfnlpavl vrniiqllrd gkkveiivgd
  301 ktandfyipe depfkiigal pylyeinlrr flsrlqyyvn tdqlvvrlwk dddntyhlkg
  361 mwvddkwmll tgnnlnpraw rldlenaili hdpkqelapq rekelelirt httivkhyrd
  421 lqsiadypik vrklirrlrr iridrlisri l
msbA (accession no. CBW17017.1):
(SEQ ID NO: 84)
      1 mhndkdlstw qtfrrlwpti apfkagliva gialilnaas dtfmlsllkp llddgfgktd
    61 rsvllwmplv viglmilrgi tsyissycis wvsgkvvmtm rrrlfghmmg mpvaffdkqs
  121 tgtllsrity dseqvassss galitvvreg asiiglfimm fyyswqlsii lvvlapivsi
  181 airvvskrfr sisknmqntm gqvttsaeqm lkghkevlif ggqevetkrf dkvsnkmrlq
  241 gmkmvsassi sdpiiqlias lalafvlyaa sfpsvmdslt agtitvviss mialmrplks
  301 ltnvnaqfqr gmaacqtlfa ildseqekde gkrvidratg dlefrnvtft ypgrevpalr
  361 ninlkipagk tvalvgrsgs gkstiaslit rfydideghi lmdghdlrey tlaslrnqva
  421 lvsqnvhlfn dtvanniaya rteeysreqi eeaarmayam dfinkmdngl dtiigengvl
  481 lsggqrqria iarallrdsp ilildeatsa ldteseraiq aaldelqknr tslviahrls
  541 tieqadeivv vedgiiverg thsellaqhg vyaqlhkmqf gq
tsf (accession no. CBW16320.1):
(SEQ ID NO: 85)
      1 maeitaslvk elrertgagm mdckkaltea ngdielaien mrksgaikaa kkagnvaadg
    61 viktkidgnv afilevncqt dfvakdagfq afadkvldaa vagkitdvev lkaqfeeerv
  121 alvakigeni nirrvasleg dvlgsyqhga rigvlvaakg adeelvkqla mhvaaskpef
  181 vkpedvsadv vekeyqvqld iamqsgkpke iaekmvegrm kkftgevslt gqpfvmepsk
  241 svgqllkehn advtgfirfe vgegiekvet dfaaevaams kqs
trmD (accession no. CBW18749.1):
(SEQ ID NO: 86)
      1 mfigivslfp emfraitdyg vtgravkkgl lniqswsprd fahdrhrtvd drpygggpgm
    61 lmmvqplrda ihaakaaage gakviylspq grkldqagvs elatnqklil vcgryegvde
  121 rviqteidee wsigdyvlsg gelpamtlid svarfipgvl gheasaieds fadglldcph
  181 ytrpevlegm evppvllsgn haeirrwrlk qslgrtwlrr pellenlalt eeqarllaef
  241 ktehaqqqhk hdgma
cca (accession no. CBW19276.1):
(SEQ ID NO: 87)
      1 mkiylvggav rdallglpvk dkdwvvvgat pqemldagyq qvgrdfpvfl hpqtheeyal
    61 arterksgsg ytgftcyaap dvtleadlqr rdltinalar ddagqiidpy hgrrdlearl
  121 lrhvspafge dplrvlrvar faaryahlsf riadetlalm remtaagele hltpervwke
  181 tenalttrnp qvyfqvlrdc galrvlfpei dalfgvpapa kwhpeidtgv htlmtlsmaa
  241 mlspqldvrf atlchdlgkg ltpknlwprh hghgpagvkl veqlcqrlrv pndlrdlakl
  301 vaeyhdliht fpilqpktiv klfdaidawr kpqrveqial tseadvrgrt gfeasdypqg
  361 rwlreawqva qavptkevve agfkgieire eltkrriaav anwkekropn pas
infB (accession no. CBW19355.1):
(SEQ ID NO: 88)
      1 mtdvtlkala aerqvsvdrl vqqfadagir ksaddsvsaq ekqtllahln reavsgpdkl
    61 tlqrktrstl nipgtggksk svqievrkkr tfvkrdpqea erlaaeeqaq reaeegarre
  121 aeeqakreaq qkaereaaeq akreaaekak reaaekdkvs nqqtddmtkt aqaekarren
  181 eaaelkrkae eearrkleee arrvaeearr maeenkwtat pEBVedtsdy hvttsqharq
  241 aedendreve ggrgrgrnak aarpakkgkh aeskadreea raavrggkgg krkgsslqqg
  301 fqkpaqavnr dvvigetitv gelankmavk gsqvikammk lgamatinqv idqetaqlva
  361 eemghkvilr reneleeavm sdrdtgaaae prapvvtimg hvdhgktsll dyirstkvas
  421 geaggitqhi gayhvetdng mitfldtpgh aaftsmrarg aqatdivvlv vaaddgvmpq
  481 tieaiqhaka agvpvvvavn kidkpeadpd rvknelsqyg ilpeewgges qfvhvsakag
  541 tgidelldai llqaevlelk avrkgmasga viesfldkgr gpvatvlvre gtlhkgdivl
  601 cgfeygrvra mrnelgqevl eagpsipvei lglsgvpaag devtvvrdek karevalyrq
  661 gkfrevklar qqksklenmf anmtegevhe vnivlkadvq gsveaisdsl lklstdevkv
  721 kiigsgvggi tetdatlaaa snailvgfnv radasarkvi esesldlryy sviynlidev
  781 kaamsgmlsp elkqqiigla evrdvfkspk fgaiagcmvt egtikrhnpi rvlrdnvviy
  841 egeleslrrf kddvnevrng mecgigvkny ndvrvgdmie vfeiieiqrt ia
rpoA (accession no. CBW19477.1):
(SEQ ID NO: 89)
      1 [sequence omitted]
rpoB (accession no. CBW20180.1):
(SEQ ID NO: 90)
      1 mvysytekkr irkdfgkrpq vldvpyllsi qldsfqkfie qdpeggygle aafrsvfpiq
    61 sysgnselqy vsyrlgEBVf dvqecqirgv tysaplrvkl rlviyereap egtvkdikeq
  121 evymgeiplm tdngtfving tervivsqlh rspgvffdsd kgkthssgkv lynariipyr
  181 gswldfefdp kdnlfvridr rrklpatiil ralnytteqi ldlffekvvf eirdnklqme
  241 liperlrget asfdieangk vyvekgrrit arhirqlekd dikhievpve yiagkvvskd
  301 yvdestgeli caanmelsld llaklsqsgh krietlftnd ldhgpyiset vrvdptndrl
  361 salveiyrmm rpgepptrea aeslfenlff sedrydlsav grmkfnrsll rdeiegsgil
  421 skddiidvmk klidirngkg evddidhlgn rrirsvgema enqfrvglvr veravkerls
  481 lgdldtlmpq dminakpisa avkeffgssq lsqfmdqnnp lseithkrri salgpggltr
  541 eragfevrdv hpthygrvcp ietpegpnig linslsvyaq tneygfletp yrrvvdgvvt
  601 deihylsaie egnyviaqan snlddeghfv edlvtorskg esslfsrdqv dymdvstqqv
  661 vsvgaslipf lehddanral mganmqrqav ptlradkplv gtgmeravav dsgvtavakr
  721 ggtvqyvdas rivikvnede mypgeagidi ynltkytrsn qntcinqmpc vslgEBVerg
  781 dvladgpstd lgelalgqnm rvafmpwngy nfedsilvse rvvqedritt ihiqelacvs
  841 rdtklgpeei tadipnvgea alskldesgi vyigaevtgg dilvgkvtpk getqltpeek
  901 llraifgeka sdvkdsslrv pngvsgtvid vqvftrdgve kdkraleiee mqlkqakkdl
  961 seelqileag lfsriravlv ssgveaekld klprdrwlel gltdeekqnq leqlaegyde
1021 lkhefekkle akrrkitqgd dlapgvlkiv kvylavkrri qpgdkmagrh gnkgviskin
1081 piedmpyden gtpvdivlnp lgvpsrmnig qilethlgma akgigdkina mlkqqqevak
1141 lrefiqrayd lgadvrqkvd lstfsddevl rlaenlrkgm piatpvfdga keaeikellk
1201 lgdlptsgqi tlfdgrtgeq ferpvtvgym ymlklnhlvd dkmharstgs yslvtqqplg
1261 gkaqfggqrf gemevwalea ygaaytlqem ltvksddvng rtkmyknivd gnhqmepgmp
1321 esfnvllkei rslginiele de
rpoC (accession no. CBW20181.1):
(SEQ ID NO: 91)
      1 mkdllkflka qtkteefdai kialaspdmi rswsfgevkk petinyrtfk perdglfcar
    61 ifgpvkdyec lcgkykrlkh rgvicekcgv evtqtkvrre rmghielasp tahiwflksl
  121 psrigllldm plrdiervly fesyvviegg mtnlerqqil teeqyldale efgdefdakm
  181 gaeaiqallk smdleqecet lreelnetns etkrkkltkr iklleafvqs gnkpewmilt
  241 vlpvlppdlr plvpldggrf atsdlndlyr rvinrnnrlk rlldlaapdi ivrnekrmlq
  301 eavdalldng rrgraitgsn krplksladm ikgkqgrfrq nllgkrvdys grsvitvgpy
  361 lrlhqcglpk kmalelfkpf iygklelrgl attikaakkm vereeavvwd ildevirehp
  421 vlinraptlh rlgiqafEBV liegkaiqlh plvcaaynad fdgdqmavhv pltleaqlea
  481 ralmmstnni lspangepii vpsqdvvlgl yymtrdcvna kgegmvltgp keaeriyrag
  541 laslharvkv riteyekden gefvahtslk dttvgrailw mivpkglpfs ivnqalgkka
  601 iskmlntcyr ilglkptvif adqtmytgfa yaarsgasvg iddmvipekk heiiseaeae
  661 vaeiqeqfqs glvtageryn kvidiwaaan drvskammdn lqtetvinrd gqeeqqvsfn
  721 siymmadsga rgsaaqirql agmrglmakp dgsiietpit anfreglnvl qyfisthgar
  781 kgladtalkt ansgyltrrl vdvaqdlvvt eddcgthegi lmtpvieggd vkeplrdrvl
  841 grvtaedvlk pgtadilvpr ntllheqwcd lleansvdav kvrsvvscdt dfgvcahcyg
  901 rdlarghiin kgeaigviaa qsigepgtql tmrtfhigga asraaaessi qvknkgsikl
  961 snvksvvnss gklvitsrnt elklidefgr tkesykvpyg avmakgdgeq vaggetvanw
1021 dphtmpvite vsgfirftdm idgqtitrqt deltglsslv vldsaerttg gkdlrpalki
1081 vdaqgndvli pgtdmpaqyf lpgkaivqle dgvqissgdt laripqesgg tkditgglpr
1141 vadlfearrp kepailaeia givsfgketk gkrrlvitpv dgsdpyeemi pkwrqlnvfe
1201 gervergdvi sdgpeaphdi lrlrgvhavt ryivnevqdv yrlqgvkind khievivrqm
1261 lrkatiesag ssdflegeqv eysrvkianr eleangkvga tfsrdllgit kaslatesfi
1321 saasfqettr vlteaavagk rdelrglken vivgrlipag tgyayhqdrm rrraageqpa
1381 tpqvtaedas aslaellnag lggsdne
holA (accession no. CBW16734.1):
(SEQ ID NO: 92)
      1 mirlypeqlr aqlneglraa ylllgndpll lqesqdairl aaasqgfeeh haftldpstd
    61 wgslfslcqa mslfasrqtl vlqlpengpn aamneqlatl sellhddlll ivrgnkltka
  121 qenaawytal adrsvqvscq tpeqaqlprw vaarakaqnl qlddaanqll cycyegnlla
  181 lagalerlsl lwpdgkltlp rveqavndaa hftpfhwvda llmgkskral hilqqlrleg
  241 sEBVillrtl qrellllvnl krqsahtplr alfdkhrvwq nrrpmigdal qrlhpaqlrq
  301 avqlltrtei tlkqdygqsv wadleglsll lchkaladvf idg
dnaC (accession no. CBW20563.1):
(SEQ ID NO: 93)
      1 mknvgdlmqr lqkmmpahit pafktgeell awqkeqgeir aaalarenra mkmqrtfnrs
    61 girplhqncs fdnyrvecdg qmnalskarq yvdefdgnia sfvfsgkpgt gknhlaaaic
  121 nelllrgksv liitvadims amkdtfsnre tseeqlindl snvdllvide igvqtesrye
  181 kviinqivdr rssskrptgm ltnsnmeemt kmlgervmdr mrlgnslwvn ftwdsyrsrv
  241 tgkey
eng (EngA accession no. CBW18582.1):
(SEQ ID NO: 94)
      1 mvpvvalvgr pnvgkstlfn rltrtrdalv adfpgltrdr kygraevegr eficidtggi
    61 dgtedgvetr maeqsllaie eadvvlimvd araglmpade aiakhlrsre kptflvankt
  121 dgldpdqavv dfyslglgei ypiaashgrg vlsllehvll pwmddvapqe evdedaeywa
  181 qfeaeqngee apeddfdpqs lpiklaivgr pnvgkstltn rilgeervvv ydmpgttrds
  241 iyipmerder eyvlidtagv rkrgkitdav ekfsviktlq aiedanvvll vidaregisd
  301 qdlsllgfil nsgrslvivv nkwdglsqev keqvketldf rlgfidfarv hfisalhgsg
  361 vgnlfesvre aydsstrrvs tamltrimtm avedhqpplv rgrrvklkya haggynppiv
  421 vihgnqvkdl pdsykrylmn yfrkslevmg tpiriqfkeg enpyankrnt ltptqmrkrk
  481 rlmkhikksk
EngB (accession no. CBW20039.1):
(SEQ ID NO: 95)
      1 mmsapdirhl psdcgievaf agrsnagkss alntltnqks lartsktpgr tqlinlfevv
    61 dgkrlvdlpg ygyaevpeem krkwqralge ylekrqslqg lvvlmdirhp lkdldqqmiq
  121 wavesniqvl vlltkadkla sgarkaqlnm vreavlafng dvqveafssl kkqgvdklrq
  181 kldswfsela pveeiqdge
```

[0123] Other inducible promotors for use in the invention, including to inducibly control flagella, include, but are not limited to:

pbad sequences
Full PBAD sequence with araC repressor
(from Invitrogen pbad-his-myc A plasmid)
(SEQ ID NO: 96)
ttatgacaacttgacggctacatcattcactttttcttcacaacc
ggcacggaactcgctcgggctggccccggtgcattttttaaatac
ccgcgagaaatagagttgatcgtcaaaaccaacattgcgaccgac
ggtggcgataggcatccgggtggtgctcaaaagcagcttcgcctg
gctgatacgttggtcctcgcgccagcttaagacgctaatccctaa
ctgctggcggaaaagatgtgacagacgcgacggcgacaagcaaac
atgctgtgcgacgctggcgatatcaaaattgctgtctgccaggtg
atcgctgatgtactgacaagcctcgcgtacccgattatccatcgg
tggatggagcgactcgttaatcgcttccatgcgccgcagtaacaa
ttgctcaagcagatttatcgccagcagctccgaatagcgcccttc
cccttgcccggcgttaatgatttgcccaaacaggtcgctgaaatg
cggctggtgcgcttcatccgggcgaaagaaccccgtattggcaaa
tattgacggccagttaagccattcatgccagtaggcgcgcggacg
aaagtaaacccactggtgataccattcgcgagcctccggatgacg
accgtagtgatgaatctctcctggcgggaacagcaaaatatcacc
cggtcggcaaacaaattctcgtccctgatttttcaccaccccctg
accgcgaatggtgagattgagaatataacctttcattcccagcgg
tcggtcgataaaaaaatcgagataaccgttggcctcaatcggcgt
taaacccgccaccagatgggcattaaacgagtatcccggcagcag
gggatcattttgcgcttcagccatacttttcatactcccgccatt
cagagaagaaaccaattgtccatattgcatcagacattgccgtca
ctgcgtcttttactggctcttctcgctaaccaaaccggtaacccc
gcttattaaaagcattctgtaacaaagcgggaccaaagccatgac
aaaaacgcgtaacaaaagtgtctataatcacggcagaaaagtcca
cattgattatttgcacggcgtcacactttgctatgccatagcatt
tttatccataagattagcggatcctacctgacgctttttatcgca
actctctactgtttctccatacccgttttttgggctaacaggagg
aattaacc
PBAD promoter sequence
(SEQ ID NO: 97)
Aagaaaccaattgtccatattgcatcagacattgccgtcactgcg
tcttttactggctcttctcgctaaccaaaccggtaaccccgctta
ttaaaagcattctgtaacaaagcgggaccaaagccatgacaaaaa
cgcgtaacaaaagtgtctataatcacggcagaaaagtccacattg
attatttgcacggcgtcacactttgctatgccatagcatttttat
ccataagattagcggatcctacctgacgctttttatcgcaactct
ctactgtttctccatacccgttttttgggctaacaggaggaatta
acc
AraC repressor protein
(SEQ ID NO: 98)
Atggctgaagcgcaaaatgatcccctgctgccgggatactcgttt
aatgcccatctggtggcgggtttaacgccgattgaggccaacggt
tatctcgatttttttatcgaccgaccgctgggaatgaaaggttat
attctcaatctcaccattcgcggtcagggggtggtgaaaaatcag
ggacgagaatttgtttgccgaccgggtgatattttgctgttcccg
ccaggagagattcatcactacggtcgtcatccggaggctcgcgaa
tggtatcaccagtgggtttactttcgtccgcgcgcctactggcat
gaatggcttaactggccgtcaatatttgccaatacggggttcttt
cgcccggatgaagcgcaccagccgcatttcagcgacctgtttggg
caaatcattaacgccgggcaaggggaagggcgctattcggagctg
ctggcgataaatctgcttgagcaattgttactgcggcgcatggaa
gcgattaacgagtcgctccatccaccgatggataatcgggtacgc
gaggcttgtcagtacatcagcgatcacctggcagacagcaatttt
gatatcgccagcgtcgcacagcatgtttgcttgtcgccgtcgcgt
ctgtcacatcttttccgccagcagttagggattagcgtcttaagc
tggcgcgaggaccaacgtatcagccaggcgaagctgcttttgagc
accacccggatgcctatcgccaccgtcggtcgcaatgttggtttt
gacgatcaactctatttctcgcgggtatttaaaaaatgcaccggg
gccagcccgagcgagttccgtgccggttgtgaagaaaaagtgaat
gatgtagccgtcaagttgtcataa
AraC protein sequence
(SEQ ID NO: 99)
MAEAQNDPLLPGYSFNAHLVAGLTPIEANGYLDFFIDRPLGMKGY
ILNLTIRGQGVVKNQGREFVCRPGDILLFPPGEIHHYGRHPEARE
WYHQWVYFRPRAYWHEWLNWPSIFANTGFFRPDEAHQPHESDLFG
QIINAGQGEGRYSELLAINLLEQLLLRRMEAINESLHPPMDNRVR
EACQYISDHLADSNFDIASVAQHVCLSPSRLSHLFRQQLGISVLS
WREDQRISQAKLLLSTTRMPIATVGRNVGFDDQLYFSRVFKKCTG
ASPSEFRAGCEEKVNDVAVKLS

### III. Therapeutic DNA, RNA and Peptides

[0124] The present invention delivers therapeutic DNA, RNA and/or peptides to cancer cells.

[0125] Gene silencing through RNAi (RNA-interference) by use of short interfering RNA (siRNA) can be used for therapeutic gene silencing. Short hairpin RNA (shRNA) transcribed from small DNA plasmids within the target cell has also been shown to mediate stable gene silencing and achieve gene knockdown at levels comparable to those obtained by transfection with chemically synthesized siRNA.

[0126] RNAi agents are agents that modulate expression of an RNA by an RNA interference mechanism. The RNAi agents employed in one embodiment of the subject invention are small ribonucleic acid molecules (also referred to herein as interfering ribonucleic acids), i.e., oligoribonucleotides, that are present in duplex structures, e.g., two distinct oligoribonucleotides hybridized to each other (e.g., an siRNA) or a single ribooligonucleotide that assumes a small hairpin formation to produce a duplex structure (e.g, shRNA).

[0127] dsRNA can be prepared according to any of a number of methods that are available in the art, including in vitro and in vivo methods, as well as by synthetic chemistry approaches. Single-stranded RNA can also be produced using a combination of enzymatic and organic synthesis or by total organic synthesis. The use of synthetic chemical methods enables one to introduce desired modified nucleotides or nucleotide analogs into the dsRNA.

[0128] In certain embodiments, instead of the RNAi agent being an interfering ribonucleic acid, e.g., an siRNA or shRNA as described above, the RNAi agent may encode an interfering ribonucleic acid, e.g., an shRNA, as described above. In other words, the RNAi agent may be a transcriptional template of the interfering ribonucleic acid. In these embodiments, the transcriptional template is typically a DNA that encodes the interfering ribonucleic acid. The DNA may be present in a vector, where a variety of different vectors are known in the art, e.g., a plasmid vector, a viral vector, etc.

[0129] Alternative the active agent may be a ribozyme. The term “ribozyme” as used herein for the purposes of specification and claims is interchangeable with “catalytic RNA” and means an RNA molecule that is capable of catalyzing a chemical reaction.

[0130] Exemplary target genes include, but are not limited to, EZH2 (accession number for human EZH2 mRNA is NM_004456). NIPP1 (accession number for human NIPP1 mRNA is NM_002713) and PP1 (accession numbers for human PP1 mRNA are PP1α mRNA: NM_002708; PP1β mRNA: NM_206876; PP1γ mRNA: NM_002710). EZH2, NIPP1 and PP1, would disrupt cancer cell processes and eliminate and/or diminish cancer stems cells. This will stop tumors from spreading/growing and prevent metastasis formation.

[0131] In another embodiment, the epigenetic target is at least one (e.g., mRNA) of NIPP1 (accession No. NM_002713); EZH2 (accession No. NM_004456); PP1α (accession No. NM_002708); PP1β (accession No. NM_206876); PP1γ (accession No. NM_002710); Suz12 (accession No. NM_015355); EED (accession No. NM_003797); EZH1 (accession No. NM_001991); RbAp48 (accession No. NM_005610); Jarid2 (accession No. NM_004973); YY1 (accession No. NM_003403); CBX2 (accession No. NM_005189); CBX4 (accession No. NM_003655); CBX6 (accession No. NM_014292); CBX7 (accession No. NM_175709); PHC1 (accession No. NM_004426); PHC2 (accession No. NM_198040); PHC3 (accession No. NM_024947); BMI1 (accession No. NM_005180); PCGF2 (accession No. NM_007144); ZNF134 (accession No. NM_003435); RING1 (accession No. NM_002931); RNF2 (accession No. NM_0072120; PHF1 (accession No. NM_024165); MTF2 (accession No. NM_007358); PHF19 (accession No. NM_001286840); SETD1A (accession No. NM_005255723); SETD1B (accession No. NM_015048); CXXC1 (accession No. NM_001101654); ASH2L (accession No. NM_004674); DPY30 (accession No. NM_032574); RBBP5 (accession No. NM_005057); WDR5 (accession No. NM_017588); KMT2A (accession No. NM_001197104); KMT2D (accession No. XM_006719616); KMT2B (accession No. NM_014727); KMT2C (accession No. NM_170606); KAT8 (accession No. NM_032188); KDM6A (accession No. NM_001291415); NCOA6 (accession No. NM_014071); PAGR1 (accession No. NM_024516); PAXIP1 (accession No. NM_007349); ASH1L (accession No. NM_018489); SMARCA2 (accession No. NM_003070); SMARCA4 (accession No. NM_001128844); BPTF (accession No. NM_182641); or SMARCA1 (accession No. NM_001282874).

```
NIPP1 (accession No. NM_002713):
(SEQ ID NO: 100)
        1 aaatgggagg gggagacgca agatggcggc agccgcgaac tccggctcta gcctcccgct
      61 gttcgactgc ccaacctggt gagtggcggg gcggccaggg ctagagtggc ccggccggag
    121 ctagcctggg ctggaagggc ggctcttttt ttacttttct gctgcgagcc gaacggctca
    181 gaaaccccgg aatggttgag gaaaaactgt ttgctgcacc gggccgggcg acgtgttgaa
    241 gaaccgagag cctggagccc aggcccagga actgaagaaa cccggggttg ggggctcaaa
    301 ggcgctcact taggcagccc ctttgagcga ttagccagtc gccggagcgc ttcgaggcct
    361 tggcccgaac ttacgcccaa ctcttgactg agtgcctggt gctctcgtgg agcatcgcat
    421 ctggcccctt cctgtacgtc ccgagcgcgc tcgagccagc cccggcccca accctacctc
    481 caagccccgc atccctctgt ggttgctgca tccctcgtgc ggcacttgtc tgtctgccac
    541 agagaatacg aggggcaggt aagccccctc ccggtttaca tctggatgta gtcaaaggag
    601 acaaactaat tgagaaactg attattgatg agaagaagta ttacttattt gggagaaacc
    661 ctgatttgtg tgactttacc attgaccacc agtcttgctc tcgggtccat gctgcacttg
    721 tctaccacaa gcatctgaag agagttttcc tgatagatct caacagtaaa cctgacagag
    781 ttcaacactg cccacaacaa gcggatttct acccttacca ttgaggaggg aaatctggac
    841 attcaaagac caaagaggaa gaggaagaac tcacgggtga cattcagtga ggatgatgag
    901 atcatcaacc cagaggatgt ggatccctca gttggtcgat tcaggaacat ggtgcaaact
    961 gcagtggtcc cagtcaagaa gaagcgtgtg gagggccctg gctccctggg cctggaggaa
  1021 tcagggagca ggcgcatgca gaactttgcc ttcagcggag gactctacgg gggcctgccc
  1081 cccacacaca gtgaagcagg ctcccagcca catggcatcc atgggacagc actcatcggt
  1141 ggcttgccca tgccataccc aaaccttgcc cctgatgtgg acttgactcc tgttgtgccg
  1201 tcagcagtga acatgaaccc tgcaccaaac cctgcagtct ataaccctga agctgtaaat
  1261 gaacccaaga agaagaaata tgcaaaagag gcttggccag gcaagaagcc cacaccttcc
  1321 ttgctgattt gatatttttg gtcatggaga agggtgggat tgggtgggaa tggggtggaa
  1381 gggtgatggg gagctaatga actagggaga aaaactttcc atgtgtgcgg tatcgtcttt
  1441 cagaatgtct cctggcatcc taaccatgta atatgacaat tgggggtggg gttgaaatag
  1501 cccataaaga cctgtcttca caacacttgc attgtagaga aaggcttctt atatcctttt
  1561 caatagactg ccctggctct ttcctaggcc ttccactacc tcctttcttt ctcccacttt
  1621 ctaggatcat ttttatgtaa agtcacatat cccaggccct caggttgaat ccagagctgt
  1681 agaggttaca gtagcatcac cagccttggg ggtccagagc ctaatttata ttcactatcc
  1741 ttccaagtcc cgggtagcag aagggttgcc atagatctca gtttgatcaa aaagaaggct
  1801 tagaattctg cagttaagct gaggtttaaa ctaaaaaatg tttccttggg tcagtggttt
  1861 tgaggtccag tagctaggct tttctctttt gtccttcctg ttggaatgaa aacatttcga
  1921 ttttccttca tctgtgactg gtgccataga cacaggttta tagttttaac ttacagtatt
  1981 gtttgaaatt tacctgtttt tcttgtcaaa cctgagcact cctcctgctg aagtttctta
  2041 tttaattcca gagtactgtc ctctactcta aggcattact tttaagtgta ttatgaaggc
  2101 agttttcaaa ggatatgacc agttggggta attcaaatta aaaaggaaaa gatttgtttg
  2161 gaagtaactg gtgtctctaa gaggaatttt tagatgtcag tttggaggct ctttcccccc
  2221 tcaattgaga gctcttgtta ttcagagctc caagactaga cctggctaac aaacatagga
  2281 gacaaagtta ggaaacattg atacaagctt tgtacagaga tttgtacatt tgtgtaatag
  2341 gccttttcat gctttatgtg tagcttttta cctgtaacct ttattacatt gtaaattaaa
  2401 cgtaactttt gtcatttggg tgcaggctgt gaatttgtct ctcagtcact gattgccact
  2461 gccatctgga aatgtttgct aaaggcacag tcactgggct tgggaggcaa tgctccatcc
  2521 ccattatatt acaaataaag atgccctaaa tgagtgtg
EZH2 (accession No. NM_004456)
(SEQ ID NO: 101)
        1 ggcggcgctt gattgggctg ggggggccaa ataaaagcga tggcgattgg gctgccgcgt
      61 ttggcgctcg gtccggtcgc gtccgacacc cggtgggact cagaaggcag tggagccccg
    121 gcggcggcgg cggcggcgcg cgggggcgac gcgcgggaac aacgcgagtc ggcgcgcggg
    181 acgaagaata atcatgggcc agactgggaa gaaatctgag aagggaccag tttgttggcg
    241 gaagcgtgta aaatcagagt acatgcgact gagacagctc aagaggttca gacgagctga
    301 tgaagtaaag agtatgttta gttccaatcg tcagaaaatt ttggaaagaa cggaaatctt
    361 aaaccaagaa tggaaacagc gaaggataca gcctgtgcac atcctgactt ctgtgagctc
    421 attgcgcggg actagggagt gttcggtgac cagtgacttg gattttccaa cacaagtcat
    481 cccattaaag actctgaatg cagttgcttc agtacccata atgtattctt ggtctcccct
    541 acagcagaat tttatggtgg aagatgaaac tgttttacat aacattcctt atatgggaga
    601 tgaagtttta gatcaggatg gtactttcat tgaagaacta ataaaaaatt atgatgggaa
    661 agtacacggg gatagagaat gtgggtttat aaatgatgaa atttttgtgg agttggtgaa
    721 tgcccttggt caatataatg atgatgacga tgatgatgat ggagacgatc ctgaagaaag
    781 agaagaaaag cagaaagatc tggaggatca ccgagatgat aaagaaagcc gcccacctcg
    841 gaaatttcct tctgataaaa tttttgaagc catttcctca atgtttccag ataagggcac
    901 agcagaagaa ctaaaggaaa aatataaaga actcaccgaa cagcagctcc caggcgcact
    961 tcctcctgaa tgtaccccca acatagatgg accaaatgct aaatctgttc agagagagca
  1021 aagcttacac tcctttcata cgcttttctg taggcgatgt tttaaatatg actgcttcct
  1081 acatcgtaag tgcaattatt cttttcatgc aacacccaac acttataagc ggaagaacac
  1141 agaaacagct ctagacaaca aaccttgtgg accacagtgt taccagcatt tggagggagc
  1201 aaaggagttt gctgctgctc tcaccgctga gcggataaag accccaccaa aacgtccagg
  1261 aggccgcaga agaggacggc ttcccaataa cagtagcagg cccagcaccc ccaccattaa
  1321 tgtgctggaa tcaaaggata cagacagtga tagggaagca gggactgaaa cggggggaga
  1381 gaacaatgat aaagaagaag aagagaagaa agatgaaact tcgagctcct ctgaagcaaa
  1441 ttctcggtgt caaacaccaa taaagatgaa gccaaatatt gaacctcctg agaatgtgga
  1501 gtggagtggt gctgaagcct caatgtttag agtcctcatt ggcacttact atgacaattt
  1561 ctgtgccatt gctaggttaa ttgggaccaa aacatgtaga caggtgtatg agtttagagt
  1621 caaagaatct agcatcatag ctccagctcc cgctgaggat gtggatactc ctccaaggaa
  1681 aaagaagagg aaacaccggt tgtgggctgc acactgcaga aagatacagc tgaaaaagga
  1741 cggctcctct aaccatgttt acaactatca accctgtgat catccacggc agccttgtga
  1801 cagttcgtgc ccttgtgtga tagcacaaaa tttttgtgaa aagttttgtc aatgtagttc
  1861 agagtgtcaa aaccgctttc cgggatgccg ctgcaaagca cagtgcaaca ccaagcagtg
  1921 cccgtgctac ctggctgtcc gagagtgtga ccctgacctc tgtcttactt gtggagccgc
  1981 tgaccattgg gacagtaaaa atgtgtcctg caagaactgc agtattcagc ggggctccaa
  2041 aaagcatcta ttgctggcac catctgacgt ggcaggctgg gggattttta tcaaagatcc
  2101 tgtgcagaaa aatgaattca tctcagaata ctgtggagag attatttctc aagatgaagc
  2161 tgacagaaga gggaaagtgt atgataaata catgtgcagc tttctgttca acttgaacaa
  2221 tgattttgtg gtggatgcaa cccgcaaggg taacaaaatt cgttttgcaa atcattcggt
  2281 aaatccaaac tgctatgcaa aagttatgat ggttaacggt gatcacagga taggtatttt
  2341 tgccaagaga gccatccaga ctggcgaaga gctgtttttt gattacagat acagccaggc
  2401 tgatgccctg aagtatgtcg gcatcgaaag agaaatggaa atcccttgac atctgctacc
  2461 tcctcccccc tcctctgaaa cagctgcctt agcttcagga acctcgagta ctgtgggcaa
  2521 tttagaaaaa gaacatgcag tttgaaattc tgaatttgca aagtactgta agaataattt
  2581 atagtaatga gtttaaaaat caacttttta ttgccttctc accagctgca aagtgttttg
  2641 taccagtgaa tttttgcaat aatgcagtat ggtacatttt tcaactttga ataaagaata
  2701 cttgaacttg tccttgttga atc
PP1α (accession No. NM_002708)
(SEQ ID NO: 102)
        1 gcggggccgc gggccggggg cggactgggg cgggcggaag gagagccagg ccggaaggag
      61 gctgccggag ggcgggaggc aggagcgggc caggagctgc tgggctggag cggcggcgcc
    121 gccatgtccg acagcgagaa gctcaacctg gactcgatca tcgggcgcct gctggaagtg
    181 cagggctcgc ggcctggcaa gaatgtacag ctgacagaga acgagatccg cggtctgtgc
    241 ctgaaatccc gggagatttt tctgagccag cccattcttc tggagctgga ggcacccctc
    301 aagatctgcg gtgacataca cggccagtac tacgaccttc tgcgactatt tgagtatggc
    361 ggtttccctc ccgagagcaa ctacctcttt ctgggggact atgtggacag gggcaagcag
    421 tccttggaga ccatctgcct gctgctggcc tataagatca agtaccccga gaacttcttc
    481 ctgctccgtg ggaaccacga gtgtgccagc atcaaccgca tctatggttt ctacgatgag
    541 tgcaagagac gctacaacat caaactgtgg aaaaccttca ctgactgctt caactgcctg
    601 cccatcgcgg ccatagtgga cgaaaagatc ttctgctgcc acggaggcct gtccccggac
    661 ctgcagtcta tggagcagat tcggcggatc atgcggccca cagatgtgcc tgaccagggc
    721 ctgctgtgtg acctgctgtg gtctgaccct gacaaggacg tgcagggctg gggcgagaac
    781 gaccgtggcg tctcttttac ctttggagcc gaggtggtgg ccaagttcct ccacaagcac
    841 gacttggacc tcatctgccg agcacaccag gtggtagaag acggctacga gttctttgcc
    901 aagcggcagc tggtgacact tttctcagct cccaactact gtggcgagtt tgacaatgct
    961 ggcgccatga tgagtgtgga cgagaccctc atgtgctctt tccagatcct caagcccgcc
  1021 gacaagaaca aggggaagta cgggcagttc agtggcctga accctggagg ccgacccatc
  1081 accccacccc gcaattccgc caaagccaag aaatagcccc cgcacaccac cctgtgcccc
  1141 agatgatgga ttgattgtac agaaatcatg ctgccatgct gggggggggt caccccgacc
  1201 cctcaggccc acctgtcacg gggaacatgg agccttggtg tatttttctt ttcttttttt
  1261 aatgaatcaa tagcagcgtc cagtccccca gggctgcttc ctgcctgcac ctgcggtgac
  1321 tgtgagcagg atcctggggc cgaggctgca gctcagggca acggcaggcc aggtcgtggg
  1381 tctccagccg tgcttggcct cagggctggc agccggatcc tggggcaacc catctggtct
  1441 cttgaataaa ggtcaaagct ggattctcgc aaaaaaaaaa aaaaaaaa
PP1β (accession No. NM_206876)
(SEQ ID NO: 103)
        1 gctgcgtgac gcggcggcgc gcaagggacg tgcggagtga gtggcgctgc gggtggggcc
      61 gtcggcggcg ctggtgagag aacgccgagc cgtcgccgca gcctccgccg ccgagaagcc
    121 cttgttcccg ctgctgggaa ggagagtctg tgccgacaag atggcggacg gggagctgaa
    181 cgtggacagc ctcatcaccc ggctgctgga ggtacgagga tgtcgtccag gaaagattgt
    241 gcagatgact gaagcagaag ttcgaggctt atgtatcaag tctcgggaga tctttctcag
    301 ccagcctatt cttttggaat tggaagcacc gctgaaaatt tgtggagata ttcatggaca
    361 atatacagat ttactgagat tatttgaata tggaggtttc ccaccagaag ccaactatct
    421 tttcttagga gattatgtgg acagaggaaa gcagtctttg gaaaccattt gtttgctatt
    481 ggcttataaa atcaaatatc cagagaactt ctttctctta agaggaaacc atgagtgtgc
    541 tagcatcaat cgcatttatg gattctatga tgaatgcaaa cgaagattta atattaaatt
    601 gtggaagacc ttcactgatt gttttaactg tctgcctata gcagccattg tggatgagaa
    661 gatcttctgt tgtcatggag gattgtcacc agacctgcaa tctatggagc agattcggag
    721 aattatgaga cctactgatg tccctgatac aggtttgctc tgtgatttgc tatggtctga
    781 tccagataag gatgtgcaag gctggggaga aaatgatcgt ggtgtttcct ttacttttgg
    841 agctgatgta gtcagtaaat ttctgaatcg tcatgattta gatttgattt gtcgagctca
    901 tcaggtggtg gaagatggat atgaattttt tgctaaacga cagttggtaa ccttattttc
    961 agccccaaat tactgtggcg agtttgataa tgctggtgga atgatgagtg tggatgaaac
  1021 tttgatgtgt tcatttcaga tattgaaacc atctgaaaag aaagctaaat accagtatgg
  1081 tggactgaat tctggacgtc ctgtcactcc acctcgaaca gctaatccgc cgaagaaaag
  1141 gtgaagaaag gaattctgta aagaaaccat cagatttgtt aaggacatac ttcataatat
  1201 ataagtgtgc actgtaaaac catccagcca tttgacaccc tttatgatgt cacaccttta
  1261 acttaaggag acgggtaaag gatcttaaat ttttttctaa tagaaagatg tgctacactg
  1321 tattgtaata agtatactct gttatagtca acaaagttaa atccaaattc aaaattatcc
  1381 attaaagtta catcttcatg tatcacaatt tttaaagttg aaaagcatcc cagttaaact
  1441 agatgtgata gttaaaccag atgaaagcat gatgatccat ctgtgtaatg tggttttagt
  1501 gttgcttggt tgtttaatta ttttgagctt gttttgtttt tgtttgtttt cactagaata
  1561 atggcaaata cttctaattt ttttccctaa acatttttaa aagtgaaata tgggaagagc
  1621 tttacagaca ttcaccaact attattttcc cttgtttatc tacttagata tctgtttaat
  1681 cttactaaga aaactttcgc ctcattacat taaaaaggaa ttttagagat tgattgtttt
  1741 aaaaaaaaat acgcacattg tccaatccag tgattttaat catacagttt gactgggcaa
  1801 actttacagc tgatagtgaa tattttgctt tatacaggaa ttgacactga tttggatttg
  1861 tgcactctaa tttttaactt attgatgctc tattgtgcag tagcatttca tttaagataa
  1921 ggctcatata gtattaccca actagttggt aatgtgatta tgtggtacct tggctttagg
  1981 ttttcattcg cacggaacac cttttggcat gcttaacttc ctggtaacac cttcacctgc
  2041 attggttttc tttttctttt ttctttcttt tttttttttt tttttttttt gagttgttgt
  2101 ttgtttttag atccacagta catgagaatc cttttttgac aagccttgga aagctgacac
  2161 tgtctctttt tcctccctct atacgaagga tgtatttaaa tgaatgctgg tcagtgggac
  2221 attttgtcaa ctatgggtat tgggtgctta actgtctaat attgccatgt gaatgttgta
  2281 tacgattgta aggcttatgt cactaaagat ttttattctg attttttcat aatcaaaggt
  2341 catatgatac tgtatagaca agctttgtag tgaagtatag tagcaataat ttctgtacct
  2401 gatcaagttt attgcagcct ttcttttcct atttcttttt tttaagggtt agtattaaca
  2461 aatggcaatg agtagaaaag ttaacatgaa gattttagaa ggagagaact tacaggacac
  2521 agatttgtga ttctttgact gtgacactat tggatgtgat tctaaaagct tttattgagc
  2581 attgtcaaat ttgtaagctt catagggatg gacatcatat ctataatgcc cttctatatg
  2641 tgctaccata gatgtgacat ttttgacctt aatatcgtct ttgaaaatgt taaattgaga
  2701 aacctgttaa cttacatttt atgaattggc acattgtatt acttactgca agagatattt
  2761 cattttcagc acagtgcaaa agttctttaa aatgcatatg tctttttttc taattccgtt
  2821 ttgttttaaa gcacatttta aatgtagttt tctcatttag taaaagttgt ctaattgata
  2881 tgaagcctga ctgatttttt ttttccttac agtgagacat ttaagcacac attttattca
  2941 catagatact atgtccttga catattgaaa tgattctttt ctgaaagtat tcatgatctg
  3001 catatgatgt attaggttag gtcacaaagg ttttatctga ggtgatttaa ataacttcct
  3061 gattggagtg tgtaagctga gcgatttcta ataaaatttt agttgtacac ttttagtagt
  3121 catagtgaag caggtctaga aaataagcct ttggcaggga aaaagggcaa tgttgattaa
  3181 tctcagtatt aaaccacatt aatctgtatc ccattgtctg gcttttgtaa attcatccag
  3241 gtcaagacta agtatgttgg ttaataggaa tccttttttt tttttttaaa gactaaatgt
  3301 gaaaaaataa tcactactta agctaattaa tattggtcat taaatttaaa ggatggaaat
  3361 ttatcatgtt taaaaattat tcaagcactc ttaaaaccac ttaaacagcc tccagtcata
  3421 aaaatgtgtt ctttacaaat atttgcttgg caacacgact tgaaataaat aaaactttgt
  3481 ttcttaggag aaaatgattc tgtaattcca gtgtcactaa tttatattgt tctttcctct
  3541 gatttttttc aggttagtga tttttttgta tacaatttaa tccaaatgtt atgacattca
  3601 gaaatcatga aacacagtag atatctgtta taatgtggtg tatcacatgg attataaagc
  3661 aaagttatgg tcgatttcta ttcttgaaag aatcaactac agtgaatcct ttgcatttga
  3721 agccttaaca tgcattgctt taattttgcc cagggacaaa ttttaataat cagcaagact
  3781 ggtttgtgca aagcgttgag tcatcaggta tttagagcct agccagctac ccagtatcca
  3841 tgctgccata tcccttcatt gtaaaaagta cctaaacatt cgtgaaatga ttttttttag
  3901 ctgaaaaatg ctggcaagaa gaattttaaa gcttaaaata ggtggtaaat ttgaagtatg
  3961 agtgtgttca cgagaaacat aggcttttca aaaaaatttt tattcaaggc aaagcaagga
  4021 acatcttgag atatgtctca agaatataaa gatgtattat tttaagccaa ggagctgaaa
  4081 tatatctcag tttataaatt caggtatatt ctttttgtct ccatggcaac cataactttt
  4141 gaaccaaaaa aaattgtttt tacatcttta tgctgaaaat gtgtttagat taggaatatg
  4201 gtcgggctga atttgctgtt gctccctaac caaatccacc tcttgttttc cttgtgagtc
  4261 catggctaaa tcaaagctgc ccctgagaag agacttaatc caagcctgat tgtactagtg
  4321 gcatcactta gaagtaggct ttccctcttc ctagtagatc tcaatgtttt ataattcctt
  4381 aaaacagctg aaaattggga caacatactt tacgcaatga acagtagtta aataggaaat
  4441 aaactagttc catataagta tacacctaga gttttaatta cctttataat gtttcttaaa
  4501 agtgaaactt agatacaatt gtgattggat acttagatac taagtgaaac ttagtgtaac
  4561 aattttgatc tgttaaattg gattttacat gtacatttga atgccagaat ttctaaataa
  4621 atcccctggt taggaaattt taaaagtcaa agcttgtttt cttcaaccac taccttctac
  4681 attggttgac ttagaccgta agctttttaa gtttctcatt gtaatttacc ttctcatgca
  4741 gattgctgat gttttattaa accttatttt tacaaaaatg aaaaaa
PPly (accession No. NM_002710)
(SEQ ID NO: 104)
        1 taaagaagtc ccggccgggc cgctgcactc cccgcgcgca tccgtgcgcc gcccgaggct
      61 gtctaaggag tcggcggcca ttttgttctt ctcgtggttc cagtggggag agaaggagga
    121 agtagggagc ggggtggcag gggggggacc cgccgcggct gctgccaccg ccgccaccac
    181 cgcctctgct cgtggcgtgg gaaaggaggt gtgagtcccg ggcgcgagcc ggcggcggcg
    241 ccgctgcggg agggtcggcg gtgggaaggc gatggcggat ttagataaac tcaacatcga
    301 cagcattatc caacggctgc tggaagtgag agggtccaag cctggtaaga atgtccagct
    361 tcaggagaat gaaatcagag gactgtgctt aaagtctcgt gaaatctttc tcagtcagcc
    421 tatcctacta gaacttgaag caccactcaa aatatgtggt gacatccatg gacaatacta
    481 tgatttgctg cgactttttg agtacggtgg tttcccacca gaaagcaact acctgtttct
    541 tggggactat gtggacaggg gaaagcagtc attggagacg atctgcctct tactggccta
    601 caaaataaaa tatcctgaga atttttttct tctcagaggg aaccatgaat gtgccagcat
    661 caacagaatt tatggatttt atgatgaatg taaaagaaga tacaacatta aactatggaa
    721 aactttcaca gactgtttta actgtttacc gatagcagcc atcgtggatg agaagatatt
    781 ctgctgtcat ggaggtttat caccagatct tcaatctatg gagcagattc ggcgaattat
    841 gcgaccaact gatgtaccag atcaaggtct tctttgtgat cttttgtggt ctgaccccga
    901 taaagatgtc ttaggctggg gtgaaaatga cagaggagtg tccttcacat ttggtgcaga
    961 agtggttgca aaatttctcc ataagcatga tttggatctt atatgtagag cccatcaggt
  1021 ggttgaagat ggatatgaat tttttgcaaa gaggcagttg gtcactctgt tttctgcgcc
  1081 caattattgc ggagagtttg acaatgcagg tgccatgatg agtgtggatg aaacactaat
  1141 gtgttctttt cagattttaa agcctgcaga gaaaaagaag ccaaatgcca cgagacctgt
  1201 aacgcctcca aggggtatga tcacaaagca agcaaagaaa tagatgtcgt tttgacactg
  1261 cctagtcggg acttgtaaca tagagtatat aaccttcatt tttaagactg taatgtgtac
  1321 tggtcagctt gctcagatag atctgtgttt gtgggggccc ttccttccat ttttgattta
  1381 gtgaatggca tttgctggtt ataacagcaa atgaaagact cttcactcca aaaagaaaag
  1441 tgttttgttt tttaattctc tgttcctttt gcaaacaatt ttaatgatgg tgttaaagct
  1501 gtacacccca ggacagttta tcctgtctga ggagtaagtg tacaattgat cttttttaat
  1561 tcagtacaac ccataatcat gtaaatgctc attttcttta ggacataaag agagccctag
  1621 ggtgctctga atctgtacat gttcttgtca taaaatgcat actgttgata caaaccactg
  1681 tgaacatttt ttatttgaga attttgtttc aaagggattg ctttttcctc tcattgtctt
  1741 gttatgtaca aactagtttt tatagctatc aacattagga gtaactttca accttgccag
  1801 catcactggt atgatgtata tttaattaaa gcacactttt ccccgaccgt atacttaaaa
  1861 tgacaaagcc attcttttaa atatttgtga ctctttccta aagccaaagt ttctgttgaa
  1921 ttatgttttg acacacccct aagtacaagg tggtatggtt gtatacacat gctgccttct
  1981 tggggattca aaaacaggtt tttgattttg aatagcaatt agtgatatag tgctgtttaa
  2041 gctactaacg ataaaaggta ataacatttt atacaatttc catatagtct attcattaag
  2101 taatcttttt acagttgcat caggcctgaa cccgtccatt cagaaagctt caaattatag
  2161 aaacaatact gttctatacg agtgaccgat tatgctttct ttggcctaca ttctttattc
  2221 tgcggtgaag ttgaggctta taagttaaaa caaaggaact aacttactgt ccaccagttt
  2281 atacagaact cacagtacct atgacttttt taaactaaga tctgttaaaa aagaaatctg
  2341 tttcaacaga tgaccgtgta caataccgtg tggtgaaaat gaattcagac ttattaaatg
  2401 atgaacttgt taaatcttct cagtgtctat ttatcagcac aatacacaca ggagaactgt
  2461 tgatggcata ttgaatagat tttcctgaat aaattgctct ggaaaccaca caaaaaaaaa
  2521 aaaaaa
Suz12 (accession No. NM_015355):
(SEQ ID NO: 105)
        1 ggtgagcggc ctccgaagcg gagcggggct ctgaggagac actttttttt tcctccctcc
      61 ttccctcctc tcctcctccc ttcccttccc ctctcctccc ctctctcctc cttcccccct
    121 cggtccgccg gagcctgctg gggcgagcgg ttggtattgc aggcgcttgc tctccggggc
    181 cgcccggcgg gtagctggcg gggggaggag gcaggaaccg cgatggcgcc tcagaagcac
    241 ggcggtgggg gagggggcgg ctcggggccc agcgcggggt ccgggggagg cggcttcggg
    301 ggttcggcgg cggtggcggc ggcgacggct tcgggcggca aatccggcgg cgggagctgt
    361 ggagggggtg gcagttactc ggcctcctcc tcctcctccg cggcggcagc ggcgggggct
    421 gcggtgttac cggtgaagaa gccgaaaatg gagcacgtcc aggctgacca cgagcttttc
    481 ctccaggcct ttgagaagcc aacacagatc tatagatttc ttcgaactcg gaatctcata
    541 gcaccaatat ttttgcacag aactcttact tacatgtctc atcgaaactc cagaacaaac
    601 atcaaaagga aaacatttaa agttgatgat atgttatcaa aagtagagaa aatgaaagga
    661 gagcaagaat ctcatagctt gtcagctcat ttgcagctta cgtttactgg tttcttccac
    721 aaaaatgata agccatcacc aaactcagaa aatgaacaaa attctgttac cctggaagtc
    781 ctgcttgtga aagtttgcca caaaaaaaga aaggatgtaa gttgtccaat aaggcaagtt
    841 cccacaggta aaaagcaggt gcctttgaat cctgacctca atcaaacaaa acccggaaat
    901 ttcccgtccc ttgcagtttc cagtaatgaa tttgaaccta gtaacagcca tatggtgaag
    961 tcttactcgt tgctatttag agtgactcgt ccaggaagaa gagagtttaa tggaatgatt
  1021 aatggagaaa ccaatgaaaa tattgatgtc aatgaagagc ttccagccag aagaaaacga
  1081 aatcgtgagg atggggaaaa gacatttgtt gcacaaatga cagtatttga taaaaacagg
  1141 cgcttacagc ttttagatgg ggaatatgaa gtagccatgc aggaaatgga agaatgtcca
  1201 ataagcaaga aaagagcaac atgggagact attcttgatg ggaagaggct gcctccattc
  1261 gaaacatttt ctcagggacc tacgttgcag ttcactcttc gttggacagg agagaccaat
  1321 gataaatcta cggctcctat tgccaaacct cttgccacta gaaattcaga gagtctccat
  1381 caggaaaaca agcctggttc agttaaacct actcaaacta ttgctgttaa agaatcattg
  1441 actacagatc tacaaacaag aaaagaaaag gatactccaa atgaaaaccg acaaaaatta
  1501 agaatatttt atcagtttct ctataacaac aatacaaggc aacaaactga agcaagagat
  1561 gacctgcatt gcccttggtg tactctgaac tgccgcaaac tttatagttt actcaagcat
  1621 cttaaactct gccatagcag atttatcttc aactatgttt atcatccaaa aggtgctagg
  1681 atagatgttt ctatcaatga gtgttatgat ggctcctatg caggaaatcc tcaggatatt
  1741 catcgccaac ctggatttgc ttttagtcgc aacggaccag ttaagagaac acctatcaca
  1801 catattcttg tgtgcaggcc aaaacgaaca aaagcaagca tgtctgaatt tcttgaatct
  1861 gaagatgggg aagtagaaca gcaaagaaca tatagtagtg gccacaatcg tctgtatttc
  1921 catagtgata cctgcttacc tctccgtcca caagaaatgg aagtagatag tgaagatgaa
  1981 aaggatcctg aatggctaag agaaaaaacc attacacaaa ttgaagagtt ttctgatgtt
  2041 aatgaaggag agaaagaagt gatgaaactc tggaatctcc atgtcatgaa gcatgggttt
  2101 attgctgaca atcaaatgaa tcatgcctgt atgctgtttg tagaaaatta tggacagaaa
  2161 ataattaaga agaatttatg tcgaaacttc atgcttcatc tagtcagcat gcatgacttt
  2221 aatcttatta gcataatgtc aatagataaa gctgttacca agctccgtga aatgcagcaa
  2281 aaattagaaa agggggaatc tgcttcccct gcaaacgaag aaataactga agaacaaaat
  2341 gggacagcaa atggatttag tgaaattaac tcaaaagaga aagctttgga aacagatagt
  2401 gtctcagggg tttcaaaaca gagcaaaaaa caaaaactct gaaaagctct aaccccatgt
  2461 tatggacaaa cactgaaatt acattttagg gaattcatcc tctaagaatt atgtttttgt
  2521 ttttaatcat atgttccaaa caggcactgt tagatgaagt aaatgatttc aacaaggata
  2581 tttgtatcag ggttctactt cacttcatta tgcagcatta catgtatatc acttttattg
  2641 atgtcattaa aacattctgt actttaagca tgaaaagcaa tatttcaaag tatttttaaa
  2701 ctcaacaaat gtcatcaaat atgttgaatt gatctagaaa ttatttcata tataaatcag
  2761 aatttttttg catttatgaa cggctgtttt tctactttgt aattgtgaga cattttcttg
  2821 gggagggaaa attggaatgg ttcccttttt tagaaattga agtggtcttc atatgtcaac
  2881 tacagaaaag gaaaaaaata gaaattgaag gatttttatg aaattatatt gcattactat
  2941 ttgcagtcaa actttgatcc ttgtttttga aatcatttgt caattcggaa tgaaaaatta
  3001 taatgtaatt ttacattaca taagttcctt ttacaattaa aaaatagcac ttcttcatct
  3061 tatgcctgtt tgagaagata ttaaattttc acattgttga cagtgaaatg ctatgttggt
  3121 ttataagatt acagaccatt tgttttcatg tggataattt tagtgcattg ctcacccggt
  3181 atgttttttt tttttaactt gaacattttg cttgttttgt ttttcttttt taattagata
  3241 atcacacgga aaattaagct gttcatatct ttaaattagg attgcaaacc aaggaaagaa
  3301 cgcatttgag attttaagat gtcacttata aggggagaag tgttcttaaa aagtcaacca
  3361 gaaaactgtt atgcctttta tttgtttgca aggatgtctt tgtaatgtgt ttcatgaata
  3421 gaatatccaa tagagataag ctgacttgaa tcattttgag caattttgcc ctgtgttata
  3481 tgtgtttcac gcacatattt gcagttggat tttctccaac agaaagtgga ttcactactg
  3541 gcacattaac aagcaccaat aggtttttat tccaactccg agcactgtgg ttgagtaaca
  3601 tcacctcaat tttttattat ccttaaagat attgcatttt catattcttt atttataaag
  3661 gatcaatgct gctgtaaata caggtatttt taattttaaa atttcattcc accaccatca
  3721 gatgcagttc cctattttgt ttaatgaagg gatatataag ctttctaatg gtgtcttcag
  3781 aaatttataa aatgtaaata ctgatttgac tggtctttaa gatgtgttta actgtgaggc
  3841 tatttaacga atagtgtgga tgtgatttgt catccagtat taagttctta gtcattgatt
  3901 tttgtgttta aaaaaaaata ggaaagaggg aaactgcagc tttcattaca gattccttga
  3961 ttggtaagct ctccaaatga tgagttctag taaactctga tttttgcctc tggatagtag
  4021 atctcgagcg tttatctcgg gctttaattt gctaaagctg tgcacatatg taaaaaaaaa
  4081 aaaaaaaaga ttattttagg ggagatgtag gtgtagaatt attgcttatg tcatttctta
  4141 agcagttatg ctcttaatgc ttaaaagaag gctagcattg tttgcacaaa aagttggtga
  4201 ttcccacccc aaatagtaat aaaattactt ctgttgagta aactttttat gtcatcgtaa
  4261 aagctgaaaa aatccctttg tttctattta taaaaaaagt gcttttctat atgtaccctt
  4321 gataacagat tttgaagaaa tcctgtaaga tgataaagca tttgaatggt acagtagatg
  4381 taaaaaaaat tcagtttaaa agaacatttg tttttacatt aaatgtttat ttgaaatcaa
  4441 atgattttgt acataaagtt caataatata aaagctg
EED (accession No. NM_003797):
(SEQ ID NO: 106)
        1 cgctttgaaa tccaccctgg gattcggaaa ccgggtagaa aactacctgg ttcagcaaac
      61 gagaattcaa acagaggagg ggcttggagg aggcgggttt cgacgaaccc agcgcaagag
    121 tacgccacgg cgcctgcgca tcccctgacg ggtactttcc attcgccaga tgggggaagc
    181 cagggggaag caggttactg tttttgcatt tctatcttca aggaagaatt aggttatgaa
    241 tagttccgtg aatagtcagg aagcgctgtc ctccaagttc aagattaagg aaacgtggca
    301 tgcacagcta aagcaagagg tgacgtcttg tatcttcccc cgtttcctgg gacattggtg
    361 gtgtagccca ttccacagac tttcgctccc tagcagcggg tcggagatcg aaggaacggg
    421 ccaattgcgg ctgaaacgtc tttggaagga ggaagggggt gagggagcat ccctttgagt
    481 ttcgcctctt ctcgaggcgg tggtgggaag ggagacatac ttaatactgc cctcttaatc
    541 caacggacct tacatcgtgt agactgccgg gagggcggcg ggaaaagggc aagacgggag
    601 ttggggaagg gaaggagcca ggaagccgcg cgggagggcg cgcgcgcgcg cccctttttc
    661 agcagtgtgg cggggtcgca cgcacgcccg cctcggcggc tgggcgcgat ttgcgacagt
    721 ggggggggcg gtggaggtgg cggcggcagc ggcaactttg cggcaagctc gggccgggct
    781 tgcttgacgg cggtgtggcg gaggccccgc cccaggcggc aggaacctgg agggaggcgg
    841 aggaatatgt ccgagaggga agtgtcgact gcgccggcgg gaacagacat gcctgcggcc
    901 aagaagcaga agctgagcag tgacgagaac agcaatccag acctctctgg agacgagaat
    961 gatgacgctg tcagtataga aagtggtaca aacactgaac gccctgatac acctacaaac
  1021 acgccaaatg cacctggaag gaaaagttgg ggaaagggaa aatggaagtc aaagaaatgc
  1081 aaatattctt tcaaatgtgt aaatagtctc aaggaagatc ataaccaacc attgtttgga
  1141 gttcagttta actggcacag taaagaagga gatccattag tgtttgcaac tgtaggaagc
  1201 aacagagtta ccttgtatga atgtcattca caaggagaaa tccggttgtt gcaatcttac
  1261 gtggatgctg atgctgatga aaacttttac acttgtgcat ggacctatga tagcaatacg
  1321 agccatcctc tgctggctgt agctggatct agaggcataa ttaggataat aaatcctata
  1381 acaatgcagt gtataaagca ctatgttggc catggaaatg ctatcaatga gctgaaattc
  1441 catccaagag atccaaatct tctcctgtca gtaagtaaag atcatgcttt acgattatgg
  1501 aatatccaga cggacactct ggtggcaata tttggaggcg tagaagggca cagagatgaa
  1561 gttctaagtg ctgattatga tcttttgggt gaaaaaataa tgtcctgtgg tatggatcat
  1621 tctcttaaac tttggaggat caattcaaag agaatgatga atgcaattaa ggaatcttat
  1681 gattataatc caaataaaac taacaggcca tttatttctc agaaaatcca ttttcctgat
  1741 ttttctacca gagacataca taggaattat gttgattgtg tgcgatggtt aggcgatttg
  1801 atactttcta agtcttgtga aaatgccatt gtgtgctgga aacctggcaa gatggaagat
  1861 gatatagata aaattaaacc cagtgaatct aatgtgacta ttcttgggcg atttgattac
  1921 agccagtgtg acatttggta catgaggttt tctatggatt tctggcaaaa gatgcttgca
  1981 ttgggcaatc aagttggcaa actttatgtt tgggatttag aagtagaaga tcctcataaa
  2041 gccaaatgta caacactgac tcatcataaa tgtggtgctg ctattcgaca aaccagtttt
  2101 agcagggata gcagcattct tatagctgtt tgtgatgatg ccagtatttg gcgctgggat
  2161 cgacttcgat aaaatacttt tgcctaatca aaattagagt gtgtttgttg tctgtgtaaa
  2221 atagaattaa tgtatcttgc tagtaagggc acgtagagca tttagagttg tctttcagca
  2281 ttcaatcagg ctgagctgaa tgtagtgatg tttacattgt ttacattctt tgtactgtct
  2341 tcctgctcag actctactgc ttttaataaa aatttatttt tgtaaagctg tgtgtttagt
  2401 tactttcatt gtggtgaaaa aaagttaaaa gtaataaaat tatgccttat ctttttaaaa
  2461 aaaaaaaaaa aaaaaa
EZH1 (accession No. NM_001991):
(SEQ ID NO: 107)
        1 gcgcatgcgt cctagcagcg ggacccgcgg ctcgggatgg aggctggaca cctgttctgc
      61 tgttgtgtcc tgccattctc ctgaagaaca gaggcacact gtaaaaccca acacttcccc
    121 ttgcattcta taagattaca gcaagatgga aataccaaat ccccctacct ccaaatgtat
    181 cacttactgg aaaagaaaag tgaaatctga atacatgcga cttcgacaac ttaaacggct
    241 tcaggcaaat atgggtgcaa aggctttgta tgtggcaaat tttgcaaagg ttcaagaaaa
    301 aacccagatc ctcaatgaag aatggaagaa gcttcgtgtc caacctgttc agtcaatgaa
    361 gcctgtgagt ggacaccctt ttctcaaaaa gtgtaccata gagagcattt tcccgggatt
    421 tgcaagccaa catatgttaa tgaggtcact gaacacagtt gcattggttc ccatcatgta
    481 ttcctggtcc cctctccaac agaactttat ggtagaagat gagacggttt tgtgcaatat
    541 tccctacatg ggagatgaag tgaaagaaga agatgagact tttattgagg agctgatcaa
    601 taactatgat gggaaagtcc atggtgaaga agagatgatc cctggatccg ttctgattag
    661 tgatgctgtt tttctggagt tggtcgatgc cctgaatcag tactcagatg aggaggagga
    721 agggcacaat gacacctcag atggaaagca ggatgacagc aaagaagatc tgccagtaac
    781 aagaaagaga aagcgacatg ctattgaagg caacaaaaag agttccaaga aacagttccc
    841 aaatgacatg atcttcagtg caattgcctc aatgttccct gagaatggtg tcccagatga
    901 catgaaggag aggtatcgag aactaacaga gatgtcagac cccaatgcac ttccccctca
    961 gtgcacaccc aacatcgatg gccccaatgc caagtctgtg cagcgggagc aatctctgca
  1021 ctccttccac acactttttt gccggcgctg ctttaaatac gactgcttcc ttcacccttt
  1081 tcatgccacc cctaatgtat ataaacgcaa gaataaagaa atcaagattg aaccagaacc
  1141 atgtggcaca gactgcttcc ttttgctgga aggagcaaag gagtatgcca tgctccacaa
  1201 cccccgctcc aagtgctctg gtcgtcgccg gagaaggcac cacatagtca gtgcttcctg
  1261 ctccaatgcc tcagcctctg ctgtggctga gactaaagaa ggagacagtg acagggacac
  1321 aggcaatgac tgggcctcca gttcttcaga ggctaactct cgctgtcaga ctcccacaaa
  1381 acagaaggct agtccagccc cacctcaact ctgcgtagtg gaagcaccct cggagcctgt
  1441 ggaatggact ggggctgaag aatctctttt tcgagtcttc catggcacct acttcaacaa
  1501 cttctgttca atagccaggc ttctggggac caagacgtgc aagcaggtct ttcagtttgc
  1561 agtcaaagaa tcacttatcc tgaagctgcc aacagatgag ctcatgaacc cctcacagaa
  1621 gaagaaaaga aagcacagat tgtgggctgc acactgcagg aagattcagc tgaagaaaga
  1681 taactcttcc acacaagtgt acaactacca accctgcgac cacccagacc gcccctgtga
  1741 cagcacctgc ccctgcatca tgactcagaa tttctgtgag aagttctgcc agtgcaaccc
  1801 agactgtcag aatcgtttcc ctggctgtcg ctgtaagacc cagtgcaata ccaagcaatg
  1861 tccttgctat ctggcagtgc gagaatgtga ccctgacctg tgtctcacct gtggggcctc
  1921 agagcactgg gactgcaagg tggtttcctg taaaaactgc agcatccagc gtggacttaa
  1981 gaagcacctg ctgctggccc cctctgatgt ggccggatgg ggcaccttca taaaggagtc
  2041 tgtgcagaag aacgaattca tttctgaata ctgtggtgag ctcatctctc aggatgaggc
  2101 tgatcgacgc ggaaaggtct atgacaaata catgtccagc ttcctcttca acctcaataa
  2161 tgattttgta gtggatgcta ctcggaaagg aaacaaaatt cgatttgcaa atcattcagt
  2221 gaatcccaac tgttatgcca aagtggtcat ggtgaatgga gaccatcgga ttgggatctt
  2281 tgccaagagg gcaattcaag ctggcgaaga gctcttcttt gattacaggt acagccaagc
  2341 tgatgctctc aagtacgtgg ggatcgagag ggagaccgac gtcctttagc cctcccaggc
  2401 cccacggcag cacttatggt agcggcactg tcttggcttt cgtgctcaca ccactgctgc
  2461 tcgagtctcc tgcactgtgt ctcccacact gagaaacccc ccaacccact ccctctgtag
  2521 tgaggcctct gccatgtcca gagggcacaa aactgtctca atgagagggg agacagaggc
  2581 agctagggct tggtctccca ggacagagag ttacagaaat gggagactgt ttctctggcc
  2641 tcagaagaag cgagcacagg ctggggtgga tgacttatgc gtgatttcgt gtcggctccc
  2701 caggctgtgg cctcaggaat caacttaggc agttcccaac aagcgctagc ctgtaattgt
  2761 agctttccac atcaagagtc cttatgttat tgggatgcag gcaaacctct gtggtcctaa
  2821 gacctggaga ggacaggcta agtgaagtgt ggtccctgga gcctacaagt ggtctgggtt
  2881 agaggcgagc ctggcaggca gcacagactg aactcagagg tagacaggtc accttactac
  2941 ctcctccctc gtggcagggc tcaaactgaa agagtgtggg ttctaagtac aggcattcaa
  3001 ggctggggga aggaaagcta cgccatcctt ccttagccag agagggagaa ccagccagat
  3061 gatagtagtt aaactgctaa gcttgggccc aggaggcttt gagaaagcct tctctgtgta
  3121 ctctggagat agatggagaa gtgttttcag attcctggga acagacacca gtgctccagc
  3181 tcctccaaag ttctggctta gcagctgcag gcaagcatta tgctgctatt gaagaagcat
  3241 taggggtatg cctggcaggt gtgagcatcc tggctcgctg gatttgtggg tgttttcagg
  3301 ccttccattc cccatagagg caaggcccaa tggccagtgt tgcttatcgc ttcagggtag
  3361 gtgggcacag gcttggacta gagaggagaa agattggtgt aatctgcttt cctgtctgta
  3421 gtgcctgctg tttggaaagg gtgagttaga atatgttcca aggttggtga ggggctaaat
  3481 tgcacgcgtt taggctggca ccccgtgtgc agggcacact ggcagagggt atctgaagtg
  3541 ggagaagaag caggtagacc acctgtccca ggctgtggtg ccaccctctc tggcattcat
  3601 gcagagcaaa gcactttaac catttctttt aaaaggtcta tagattgggg tagagtttgg
  3661 cctaaggtct ctagggtccc tgcctaaatc ccactcctga gggaggggga agaagagagg
  3721 gtgggagatt ctcctccagt cctgtctcat ctcctgggag aggcagacga gtgagtttca
  3781 cacagaagaa tttcatgtga atggggccag caagagctgc cctgtgtcca tggtgggtgt
  3841 gccgggctgg ctgggaacaa ggagcagtat gttgagtaga aagggtgtgg gcgggtatag
  3901 attggcctgg gagtgttaca gtagggagca ggcttctccc ttctttctgg gactcagagc
  3961 cccgcttctt cccactccac ttgttgtccc atgaaggaag aagtggggtt cctcctgacc
  4021 cagctgcctc ttacggtttg gtatgggaca tgcacacaca ctcacatgct ctcactcacc
  4081 acactggagg gcacacacgt accccgcacc cagcaactcc tgacagaaag ctcctcccac
  4141 ccaaatgggc caggccccag catgatcctg aaatctgcat ccgccgtggt ttgtattcat
  4201 tgtgcatatc agggataccc tcaagctgga ctgtgggttc caaattactc atagaggaga
  4261 aaaccagaga aagatgaaga ggaggagtta ggtctatttg aaatgccagg ggctcgctgt
  4321 gaggaatagg tgaaaaaaaa cttttcacca gcctttgaga gactagactg accccaccct
  4381 tccttcagtg agcagaatca ctgtggtcag tctcctgtcc cagcttcagt tcatgaatac
  4441 tcctgttcct ccagtttccc atcctttgtc cctgctgtcc cccactttta aagatgggtc
  4501 tcaacccctc cccaccacgt catgatggat ggggcaaggt ggtggggact aggggagcct
  4561 ggtatacatg cggcttcatt gccaataaat ttcatgcact ttaaagtcct gtggcttgtg
  4621 acctcttaat aaagtgttag aatccaaaaa aaaa
RbAp48 (accession No. NM_005610):
(SEQ ID NO: 108)
        1 gctcccattg gctgatgttg gcgcgaaggt gcgcgagtca gccctcgcgc tgggggcgca
      61 ggaaacaata gaggccgcgc gcacagagcg agctcttgca gcctccccgc ccctcccgca
    121 acgctcgacc ccaggattcc cccggctcgc ctgcccgcca tggccgacaa ggaagcagcc
    181 ttcgacgacg cagtggaaga acgagtgatc aacgaggaat acaaaatatg gaaaaagaac
    241 accccttttc tttatgattt ggtgatgacc catgctctgg agtggcccag cctaactgcc
    301 cagtggcttc cagatgtaac cagaccagaa gggaaagatt tcagcattca tcgacttgtc
    361 ctggggacac acacatcgga tgaacaaaac catcttgtta tagccagtgt gcagctccct
    421 aatgatgatg ctcagtttga tgcgtcacac tacgacagtg agaaaggaga atttggaggt
    481 tttggttcag ttagtggaaa aattgaaata gaaatcaaga tcaaccatga aggagaagta
    541 aacagggccc gttatatgcc ccagaaccct tgtatcatcg caacaaagac tccttccagt
    601 gatgttcttg tttttgacta tacaaaacat ccttctaaac cagatccttc tggagagtgc
    661 aacccagact tgcgtctccg tggacatcag aaggaaggct atgggctttc ttggaaccca
    721 aatctcagtg ggcacttact tagtgcttca gatgaccata ccatctgcct gtgggacatc
    781 agtgccgttc caaaggaggg aaaagtggta gatgcgaaga ccatctttac agggcatacg
    841 gcagtagtag aagatgtttc ctggcatcta ctccatgagt ctctgtttgg gtcagttgct
    901 gatgatcaga aacttatgat ttgggatact cgttcaaaca atacttccaa accaagccac
    961 tcagttgatg ctcacactgc tgaagtgaac tgcctttctt tcaatcctta tagtgagttc
  1021 attcttgcca caggatcagc tgacaagact gttgccttgt gggatctgag aaatctgaaa
  1081 cttaagttgc attcctttga gtcacataag gatgaaatat tccaggttca gtggtcacct
  1141 cacaatgaga ctattttagc ttccagtggt actgatcgca gactgaatgt ctgggattta
  1201 agtaaaattg gagaggaaca atccccagaa gatgcagaag acgggccacc agagttgttg
  1261 tttattcatg gtggtcatac tgccaagata tctgatttct cctggaatcc caatgaacct
  1321 tgggtgattt gttctgtatc agaagacaat atcatgcaag tgtggcaaat ggcagagaac
  1381 atttataatg atgaagaccc tgaaggaagc gtggatccag aaggacaagg gtcctagata
  1441 tgtctttact tgttgtgatt ttagactccc cttttttctt ctcaaccctg agagtgattt
  1501 aacactggtt ttgagacaga ctttattcag ctatccctct atataatagg taccaccgat
  1561 aatgctatta gcccaaaccg tgggtgtttt ctaaatatta ataggggggc ttgattcaac
  1621 aaagccacag acttaacgtt gaaattttct tcaggaattt tctagtaacc caggtctaaa
  1681 gtagctacag aaaggggaat attatgtgtg attatttttc ttcttatgct atatccccaa
  1741 gtttttcaga ctcatttaag taaaggctag agtgagtaag gaatagagcc aaatgaggta
  1801 ggtgtctgag ccatgaagta taaatactga aagatgtcac ttttattcag gaaatagggg
  1861 gagattcaag tcatatagat tcctactcga aaatcttgac acctgacttt ccaggatgca
  1921 cattttcata cgtagaccag tttcctcttg gtttcttcag ttaagtcaaa acaacacgtt
  1981 cctctttccc catatattca tatatttttg ctcgttagtg tatttcttga gctgttttca
  2041 tgttgtttat ttcctgtctg tgaaatggtg tttttttttt tgttgttggt tttttttttt
  2101 ttttttttaa cttgggacca ccaagttgta aagatgtatg tttttacctg acagttatac
  2161 cacaggtaga ctgtcaagtt gagaagagtg aatcaataac ttgtatttgt tttaaaaatt
  2221 aaattaatcc ttgataagag ttgctttttt tttttaggag ttagtccttg accactagtt
  2281 tgatgccatc tccattttgg gtgacctgtt tcaccagcag gcctgttact ctccatgact
  2341 aactgtgtaa gtgcttaaaa tggaataaat tgcttttcta cataacccca tgctgatggg
  2401 ttttatttag tataaaacat ccatcaaaca ccagtctctg gcttctagaa gagtccttca
  2461 gatgacagtt gttgtccatg gtctttgact atcaagagca gaattaaatg taatagtccc
  2521 agagctgtag aaaagaactt tactccttcc cagggaaagt gaaagacata aaacactgaa
  2581 tcagaggtgg cacagattag tctttgataa ggtaacgttt ctttgaagtc tatctgtaga
  2641 gaactacatg gacttccaag agtgtcaaag gcagtgtggt agagagaatt taaggcaaga
  2701 tttaaatttg gaaaaggtgc ttgaaccttt tctcagaggt tttatttccc cagtatgttt
  2761 ttcactgggg cctttactta ggttagaaat aataggcttt gaaggcctct atcaccagat
  2821 gcaataacca gataaaattc ctgttttttc ccaatcgctt agttttttgt tgttgttgtt
  2881 ttttaactga gtagatcatt ctgacccaga actactttca tgaggtaaga tctttgggaa
  2941 aatctgaata gcgttaacca ttagattcaa atctcaaatg gtttcttttc aagtctagtt
  3001 gttttagagt atagtgagaa ataccttgac acaattttaa gagtaaacta tatgggtcag
  3061 catatccttg aacaaaaagt agactttgta aaagtattca tttaaattct aacactcgtg
  3121 gcacaaaaga atggaaattg taaacccatg taatggaaat tggctatctt tttgacccca
  3181 catgtgcccc tcaaaaatgt ttttggtttg ggtcaacaca aggcaagata cattctttaa
  3241 aatactccca gatgtgtcca tacattcatc cttcactcag tgcatatgtg agggttgttg
  3301 ctggaagaca ggaggctcat ctttcctttc cttggtgcat tgagatcagt atcaacagca
  3361 gatgaaatag aatccagcaa agagttgaca tgttctgcct ccggccaact ctagaatctt
  3421 tttaagcagg tcagccagta tttgcaactt ccacaggatg aattgcttgc caagtttctg
  3481 gcactcttgt ctggttggaa gagtacatcc aaagggtact tagtgatcct ttgctaagaa
  3541 gttttttgct gtttccgggt tacagatttg gccatatatt tctaaacagc ccctgtaaag
  3601 ttgaaagaaa aagtttataa cagtgaactt ctgaggttta gttactgcag gctttgttga
  3661 gaagagattg ttacagtgtg atttatggat gatcagggat gactttcccc tagcaaatat
  3721 ttggatgcct cctgtttgtc aaatagaatg aatggtgatg gtgatgggag ggatagttaa
  3781 acgttttctc tgctaggtta acttcttaca ggtataatta caatgcctga aattctgtag
  3841 tttcatttct ttggattagt cgttgtcttt tccagattgt acacaatctg atcaacacaa
  3901 aggtagttag tagatcatta acctcaattg caaggttata atttctcaaa cattaagcat
  3961 attatcagtc atgtggattc aaacacagta taagaaaatc ctcaaggctg ggtgtgatgg
  4021 cttatgcctg taatcccagc tacttagcag gctgaggcag gagtattgtt tgaacccagg
  4081 aggcagagtt gcagtgagcc aagatcgtgc cactactcca gcctgggcaa aatagcaaga
  4141 cccgaccccc catctctact aaaaagaaat ttaaaaaaat aaaatcctag aaaattagaa
  4201 aaagcaacaa tagttacttg tgggccaggc gcggtggttc acgcctgtaa tcccagcact
  4261 ttgagaggct gaggcacgtg gatcacaagg tcaggagttc aagaccagcc tggccaagat
  4321 ggtgaaaccc cgtttctact aaaaatacaa aaactagctg gccgtggtgg catgctcctg
  4381 tagtcccagc tactcaggag gctgaggcag gaaaatcact tgaacccagg aggtggaggt
  4441 tgcagtgaac tgagaccgtg ccactgcact ccagcctggg tggcagagcg agactgtctc
  4501 aaaaaaaaaa gaaagttgtg aatttgatgt aagcttagga aatgaataaa atttataggc
  4561 atctgtataa tgtacaactt gacacggact ttcttttatc cttagtttct ttcacggact
  4621 ctagaacttt tatcagaata tactggtaaa acattggggg agggatcctg agtaggtgat
  4681 tggtcagaaa gatgccttca gttttgtcag tgtctaaaag ttaagtctgt ttaggccaag
  4741 catggtggct cacacctgaa atcccagcac tctgggaggc cgaggcaagt ggatcacaag
  4801 gtcaggagat gagaccatct tagccaacat ggtgaaaccc cgtctctact aaaatacaaa
  4861 aaaattagcc aggcgtggtg gtgcgtgcct ataatcccag ctacttggga ggctgaggca
  4921 ggggaatcgc ttgaacccgg gaggcagagg tcacgccact gcactccagc ctggcaacag
  4981 agcaagactc cgtctcaaaa aaaaaaaaaa aaaaaaagag taagtctgtg taacatgaac
  5041 atctctgctt ccacccaaaa ccacagcctt tgaatattat ataaggaact taatggatag
  5101 atatgtttat tatttttgat agcacaactg ctttctctgc tattataagg aaaactgaga
  5161 atagcaggtg ggtagggtag gatgaggaaa caagatgccc aaagcctaga tgccacagaa
  5221 ttcatggtga taatcagggc atattttgag tcctactaga aacaaacatt ccaaatgaac
  5281 tctgaatgcc tgactcaggc gttttggagg tttgggttat ccccttgtca ttaggcacac
  5341 aagggttttt tgttgttttt gttttttggg tttttgtttt gttttgaggc agtctcactc
  5401 tgttgtacaa gctggagtgc tgtattgtga tcttgactca ctgcaacctc tgcctcctgg
  5461 ttcaagcgat tctcctgcct tggcctcctg agtagctggg attataagtg cctgccacta
  5521 tgcccggcta atttttgtat ttttagtgga gatggagttt tgccatgttg gccaggctgg
  5581 tcttgaactc ctgactccag gtgatccacc ctcctcagcc tcccaaagtg ctaggattac
  5641 aggcgtgagc caccccgtcc ggcctgtttt taaggcatta attagtattg ttaggaaagc
  5701 agtaacaatg caaacaccac tcttctcttc acaaagatca ccttgagact gtgtctccat
  5761 tccacctgcc tgagaagtgg gagcatcagc ctgttccagg ctcttgggta gtagcatagc
  5821 cctttaaaaa gagagagcca ttttccatgt gtttttggat aagcacaatt tgaaaatcat
  5881 ttcccaaatc ctctttttgt ttttgattct aaggtaaaat tttccctaag ccctcccacc
  5941 atcccctcag ccagtattag atgagatttg tatagcagca gaaactgact tataagtaga
  6001 gagctcttca gcaagactga gccttagctg ttccatctct ttgttcttct gttgctggag
  6061 ttgcacccca tttcttaact gcctctggcg ttcttccatt tcctccagct gttcctgcat
  6121 gagatggcca agaacatttc taatgagcca aacaataaaa actcacattg tccactctta
  6181 cttataaaac acttttttgt tcattgttta atcttgatag cagtattgag gctggtattt
  6241 atatgatagg ttatgaaaca ggttcaaaga agttgtgtct tggaaaaaaa gtgacaatgc
  6301 ttttgaaaat gatgacgaaa aaggcatctt gtctgttaac cacagcttgc tttaatagaa
  6361 tcctgggagg gtgattggga ctttttagta ttacaacctt agtgtcattg aggaggattt
  6421 tggtctagtt agtgggctga gtttcatata cctctccctc catgtgcagg tttgttaaga
  6481 taattggtag tttttaataa tataaaatac ttaagttgaa atacaaaagt gtggcaacaa
  6541 ttattaaata ttggctagaa ttctaggaga gttacacaac tagtggaagt ccatgtttag
  6601 aaaataaatg gcttgtttaa ggaaaagttt ttgtgtccaa agctccttaa agtcagagag
  6661 atttctacct ggtacttaac atcatatgga aattgatgct ttagtgaggg tgttggctat
  6721 cctattgcta atttcctgca tccttttttc ttctttattt ttgtatagag acagggtctc
  6781 gctatgttgc ccaggctggt cttgttcctg ggctcaagca gtcctcccgc ctcggtctcc
  6841 caaagtgctg ggattacagg tgtgagccac tgtgcccagc ttatcctttt ttcattacac
  6901 aaaaagactg aatttggtta gttctaagtt ggaagataaa gatggtatgc acaggaggcc
  6961 cttgggagcc ctcagataac tttctcattc ttccagaatc aggctgggat gcattctgta
  7021 aattttccct gcctaggatg tatacctgag gaataaggta aggaagatgt cagcaagtca
  7081 gtctctggtt tacctgctag ctggcatgga tccttaagga agcaggaggg agttgggaag
  7141 agaggaaggg gtgaagttgg tatcttttaa agcgagagtg attttacctc agattttgaa
  7201 gaatactaag gaatccagtt gttggggtac atgctattat tagaaggatc tagataattt
  7261 gtcctctgag tcatacttga cattgtacct gtggcacatc aatccgcact gtttgatact
  7321 ctggctgaat ctcagctttc accaacattg tcaaaggacc ttttttagtg cccagccatg
  7381 cctaagagtg tgtcatctga agagggaagc atctgcatac tgctgtcctg attgctcagt
  7441 cctcactacc taccagaccc gttggtaagg tacaaaagta catgcttgga aaagcagtct
  7501 gcaccaccag tgataagctg tgacagagtg gaacagcctc aatgaaatga aggaaggatt
  7561 gctacagtgg cattaaggat ggtctcttaa tcctgtgtta accactagat taactttaca
  7621 atcaactcaa aatccttcaa aggctttcca ctttctttag tggcattcag accccctcta
  7681 gtttgacccc tacctccaac ttgaacctct gttactcttc cgtatgaaca ttttcctcta
  7741 gccctggact actagtaccg aagtcactag tcacatagga ctcatttgaa atatgactag
  7801 tctcaattga gatgtaatgt aagtgtaaaa tacacagcag atttctaaga cagcacacaa
  7861 aatgtaaaat atgtcaaaaa tatttgatac tgattacatg ttgaaatata tgtgttgggt
  7921 taaataaaat gcattaaagt taa
Jarid2 (accession No. NM_004973):
(SEQ ID NO: 109)
        1 tggatagcct ctctctcatt ggttaggggg cttggaaaaa agagactcgg cgagccctcg
      61 ctgtggtgct gccgccgccg ccgccgccgc cgctggagtt gactcttctg ctcgcactgc
    121 tgctgcagca caaacgtgac ttccaacatt ttttatttat ctttcccttt tcttttccaa
    181 gatgtaacta cggatcagac actaaggacc ttcacgtttc gctgatgtag tttttggagg
    241 aaaaaggggg gggagtgaag ggcgtcggtt tttttttgtg tgtgtgtgta tgtgtttcgg
    301 gggaaatttt ccattatgag tgttttacta aagtgaattt ttttttgttt gcttcgttcg
    361 tctttggctc tttttttttc cttcccaatt tcggatttat ttcaaggcga atctggcttt
    421 gggggaagag gaagaaaagt cggattacaa gatcaaccac caccaacaac aataaaaacc
    481 accaggatat ttttttgcaa atttctgacg gctttaaatt catgaagcaa ttgtcccctt
    541 ttgcaatcag catttggatc tcagaatgag caaggaaaga cccaagagga atatcattca
    601 gaagaaatac gatgacagtg atgggattcc gtggtcagaa gaacgggtgg tacgtaaagt
    661 cctttatttg tctctgaagg agttcaagaa ttcccagaag aggcagcatg cggaaggcat
    721 tgctgggagc ctgaaaactg tgaatgggct ccttggtaat gaccagtcta agggattagg
    781 accagcatca gaacagtcag agaatgaaaa ggacgatgca tcccaagtgt cctccactag
    841 caacgatgtt agttcttcag attttgaaga agggccgtcg aggaaaaggc ccaggctgca
    901 agcacaaagg aagtttgctc agtctcagcc gaatagtccc agcacaactc cagtaaagat
    961 agtggagcca ttgctacccc ctccagctac tcagatatca gacctctcta aaaggaagcc
  1021 taagacagaa gattttctta cctttctctg ccttcgaggt tctcctgcgc tgcccaacag
  1081 catggtgtat tttggaagct ctcaggatga ggaggaagtc gaggaggaag atgatgagac
  1141 agaagacgtc aaaacagcca ccaacaatgc ttcatcttca tgccagtcga cccccaggaa
  1201 aggaaaaacc cacaaacatg ttcacaacgg gcatgttttc aatggttcca gcaggtcaac
  1261 acgggagaag gaacctgttc aaaaacacaa aagcaaagag gccactcccg caaaggagaa
  1321 gcacagcgat caccgggctg acagccgccg ggagcaggct tcagctaacc accccgcagc
  1381 ggccccctcc acgggttcct cggccaaggg gcttgctgcc acccatcacc acccccctct
  1441 gcatcggtcg gctcaggact tacggaaaca ggtttctaag gtaaacggag tcactcgaat
  1501 gtcatctctg ggtgcaggtg taaccagtgc caaaaagatg cgcgaggtca gaccttcacc
  1561 atccaaaact gtgaagtaca ctgccacggt gacgaagggg gctgtcacat acaccaaagc
  1621 caagagagaa ctggtcaagg acaccaaacc caatcaccac aagcccagtt ccgctgtcaa
  1681 ccacacaatc tcagggaaaa ctgaaagtag caatgcaaaa acccgcaaac aggtgctatc
  1741 cctcgggggg gcgtccaagt ccactgggcc cgccgtcaat ggcctcaagg tcagtggcag
  1801 gttgaaccca aagtcatgca ctaaggaggt gggggggcgg cagctgcggg agggcctgca
  1861 gctgcgggag gggctgcgga actccaagag gagactggaa gaggcacacc aggcggagaa
  1921 gccgcagtcg ccccccaaga agatgaaagg ggcggctggc cccgccgaag gccctggcaa
  1981 gaaggccccg gccgagagag gtctgctgaa cggacacgtg aagaaggaag tgccggagcg
  2041 cagtctggag aggaatcggc cgaagcgggc cacggccggg aagagcacgc caggcagaca
  2101 agcacatggc aaggcggaca gcgcctcctg tgaaaatcgt tctacctcgc aaccggagtc
  2161 cgtgcacaag ccgcaggact cgggcaaggc cgagaagggc ggcggcaagg ccggggtggc
  2221 ggccatggac gagatccccg tcctcaggcc ctccgccaag gagttccacg atccgctcat
  2281 ctacatcgag tcggtccgcg ctcaggtgga gaagttcggg atgtgcaggg tgatcccccc
  2341 tccggactgg cggcccgagt gcaagctcaa cgatgagatg cggtttgtca cgcagattca
  2401 gcacatccac aagctgggcc ggcgctgggg ccccaacgtg cagcggctgg cctgcatcaa
  2461 gaagcacctc aaatctcagg gcatcaccat ggacgagctc ccgctcatag ggggctgtga
  2521 gctcgacctg gcctgctttt tccggctgat taatgagatg ggcggcatgc agcaagtgac
  2581 tgacctcaaa aaatggaaca aactagcaga catgctgcgc atccccagaa ctgcccagga
  2641 ccggctggcc aagctgcagg aggcctactg ccagtaccta ctctcctacg actccctgtc
  2701 cccagaggag caccggcggc tggagaagga ggtgctgatg gagaaggaga tcctggagaa
  2761 gcgcaagggg ccgctggaag gccacacaga gaacgaccac cacaagttcc accctctgcc
  2821 ccgcttcgag cccaagaatg ggctcatcca cggcgtggcc cccaggaacg gcttccgcag
  2881 caagctcaag gaggtgggcc aggcccagtt gaagactggc cggcggcgac tcttcgctca
  2941 ggaaaaagaa gtggtcaagg aagaggagga ggacaaaggc gtcctcaatg acttccacaa
  3001 gtgcatctat aagggaaggt ctgtttctct aacaactttt tatcgaacag cgaggaatat
  3061 catgagcatg tgtttcagca aggagcctgc cccagccgaa atcgagcaag agtactggag
  3121 gctagtggaa gagaaggact gccacgtggc agtgcactgc ggcaaggtgg acaccaacac
  3181 tcacggcagt ggattcccag taggaaaatc agaacccttt tcgaggcatg gatggaacct
  3241 caccgtcctc cccaataaca cagggtccat cctgcgtcac ctcggtgctg tgcctggagt
  3301 gactattccc tggctaaata ttggcatggt cttttctacc tcatgctggt ctcgagacca
  3361 aaatcacctt ccatacattg actacttaca cactggtgct gactgcattt ggtattgcat
  3421 tcctgctgag gaggagaaca agctggaaga tgtggtccac accctgctgc aagccaatgg
  3481 caccccaggg ctgcagatgc tggaaagcaa cgtcatgatc tccccggagg tgctgtgcaa
  3541 agaggggatc aaggtgcaca ggaccgtgca gcagagtggc cagtttgtcg tctgcttccc
  3601 gggatccttt gtgtccaaag tgtgctgtgg gtacagcgtg tctgaaaccg tgcactttgc
  3661 taccacccag tggacaagta tgggctttga gaccgccaag gaaatgaagc gtcgccatat
  3721 agctaagcca ttctccatgg agaagttact ctaccagatt gcacaagcag aagcaaaaaa
  3781 agaaaacggt cccactctca gtaccatctc agccctcctg gatgagctca gggatacaga
  3841 gctgcggcag cgcaggcagc tgttcgaggc tggcctccac tcctccgcac gctatggcag
  3901 ccacgatggc agcagcacgg tggcggacgg gaagaaaaag cctcgaaagt ggctgcagtt
  3961 ggagacgtca gagaggaggt gtcagatctg ccagcacctg tgctacctgt ccatggtggt
  4021 acaagagaac gaaaacgtcg tgttctgtct ggagtgtgct ctgcgccacg tggagaaaca
  4081 gaagtcctgc cgagggctga agttgatgta ccgctacgat gaggaacaga ttatcagtct
  4141 ggtcaatcag atctgcggca aagtgtctgg taaaaacggc agcattgaga actgtctcag
  4201 taaacccaca ccaaaaagag gtccccgcaa gagagcgaca gtggacgtgc ccccctcccg
  4261 tctgtcagcc tccagttcat ccaaaagtgc ttcgagctca tcatgaagat gccaacgccc
  4321 gtggtcgatt tatatatatt tttttgtaat tattatattc tagtttggag tacttgctgt
  4381 aggattcaag ctgtctttgc actagctcta aagaagattt tcttctggtt ttagagaact
  4441 aattttgttt tagcattaaa ctgttgaact tttttttgta cttagaaaac ctagatactg
  4501 cagtcagatt ttggaaactg ccgtatagtc actgttttaa aaaccccgga ggggctgtat
  4561 taatttgtat tgccccatgg ctgacaaaag cctttttttt tggttttgat tttttttttt
  4621 ttgtaactgt tggggggaaa aaggcttttt aacccatttt tgaagagggt gaagtttgga
  4681 gaacaaattt aaaaaccatc agtcatgtga gcagattttt tagaagggat aggagacaca
  4741 cgcgcacaca cacacacaca cgaaacttga aatggctttg ctttggctgt cgtcttctgc
  4801 cgtgtgccag atgagcttgt gatctgggaa gccggggcac ccccgttttg tttctctggg
  4861 cggttgtggc agctgaaggc ggacgttgtt tcctaaccat aggtggaacg aggagacggg
  4921 agcgagtggg ctctccacca gcacatcact atgcatctgt tccaggaaag aagaaaagcg
  4981 agcgaggaag acggaaaaga ctgcctgcct tggaggggtc acatgaggga gacctgtgcc
  5041 tgatttcatt aggaaatcca ttctgttatt ttttggtgct gttggctact ttatcaaaaa
  5101 acccttcaat agcatcctta agatttaaaa aaaaaaaaaa aaaaaaggaa aaaaaagtga
  5161 tggaagccgt aagtgcttct ttgtcatcga cgtgcaatct ttctaacatt ccatctccat
  5221 ctcaccgctt cttgtttgac accttcacaa gtcagcatta atctttcttt taaaacttgt
  5281 ttcatttatg atcatgtaga gagccactag gaggcctgca gttatttttg aatgtgaaaa
  5341 tgcatttgcg ttcatcttgt ctattttttc tcttcatgtt gtaacaaaaa ggaaaaaaga
  5401 aaaaaaaatc ccatcccttt tgtacatatg cctgtaaatt gttttaaata cttgagcctt
  5461 tttctcggtg gggggtgggg aggggggtga gaagacaaga tgaagaaaag ccttacattt
  5521 cagtttcttc atcggttgga ttggatgctt acagggtttt tcttgtaaca tttataagtg
  5581 ctgcttacat cactgaacaa caacaaaaaa ataataatgg agtagctgtt gcccttctcc
  5641 ggttgtgtgt acagtatgtg tggaataaaa aagggaaact gttttcacaa gctgttcttt
  5701 gtttcataat tggattcatc aatcccgtag ctacccatat tgcactgagc ttgccagtgg
  5761 tgactgccag gaacgtccta tgatccactt tgttggttgt tgttgcagaa gactgaactg
  5821 ttttggaata tttaacaatt acagaaacag tcaagtgttt tccaatgtgg ttgtccggtt
  5881 tctatggcct tgctgtgtac tttccctctt tttgacagta aacttctgcc tatggcttac
  5941 agtttgacat ttaatttatt agcgctgctc tgcacccctc ccttgggagg gagacttcat
  6001 gtggtttatt gcgagttttt tgtttacttt tcaggtttgt actacaaggt ttaataataa
  6061 aaacaaagtt ttttggacat ttgtctgtct tgtggaaaaa aaaaaaaaaa aa
YY1 (accession No. NM_003403):
(SEQ ID NO: 110)
        1 agggcgaacg ggcgagtggc agcgaggcgg ggcgggctga ggccagcgcg gaagtctcgc
      61 gaggccgggc ccgagcagag tgtggcggcg gcggcgagat ctgggctcgg gttgaggagt
    121 tggtatttgt gtggaaggag gcggaggcgc aggaggaagg gggaagcgga gcgccggccc
    181 ggagggcggg aggaggcgcg gccagggcgg gcggttgcgg cgaggcgagg cgaggcgggg
    241 agccgagacg agcagcggcc gagcgagcgc gggcgcgggc gcaccgaggc gagggaggcg
    301 gggaagcccc gccgccgccg cggcgcccgc cccttccccc gccgcccgcc ccctctcccc
    361 ccgcccgctc gccgccttcc tccctctgcc ttccttcccc acggccggcc gcctcctcgc
    421 ccgcccgccc gcagccgagg agccgaggcc gccgcggccg tggcggcgga gccctcagcc
    481 atggcctcgg gcgacaccct ctacatcgcc acggacggct cggagatgcc ggccgagatc
    541 gtggagctgc acgagatcga ggtggagacc atcccggtgg agaccatcga gaccacagtg
    601 gtgggcgagg aggaggagga ggacgacgac gacgaggacg gcggcggtgg cgaccacggc
    661 ggcgggggcg gccacgggca cgccggccac caccaccacc accatcacca ccaccaccac
    721 ccgcccatga tcgctctgca gccgctggtc accgacgacc cgacccaggt gcaccaccac
    781 caggaggtga tcctggtgca gacgcgcgag gaggtggtgg gcggcgacga ctcggacggg
    841 ctgcgcgccg aggacggctt cgaggatcag attctcatcc cggtgcccgc gccggccggc
    901 ggcgacgacg actacattga acaaacgctg gtcaccgtgg cggcggccgg caagagcggc
    961 ggcggcggct cgtcgtcgtc gggaggcggc cgcgtcaaga agggcggcgg caagaagagc
  1021 ggcaagaaga gttacctcag cggcggggcc ggcgcggcgg gcggcggcgg cgccgacccg
  1081 ggcaacaaga agtgggagca gaagcaggtg cagatcaaga ccctggaggg cgagttctcg
  1141 gtcaccatgt ggtcctcaga tgaaaaaaaa gatattgacc atgagacagt ggttgaagaa
  1201 cagatcattg gagagaactc acctcctgat tattcagaat atatgacagg aaagaaactt
  1261 cctcctggag gaatacctgg cattgacctc tcagatccca aacaactggc agaatttgct
  1321 agaatgaagc caagaaaaat taaagaagat gatgctccaa gaacaatagc ttgccctcat
  1381 aaaggctgca caaagatgtt cagggataac tcggccatga gaaaacatct gcacacccac
  1441 ggtcccagag tccacgtctg tgcagaatgt ggcaaagctt ttgttgagag ttcaaaacta
  1501 aaacgacacc aactggttca tactggagag aagccctttc agtgcacgtt cgaaggctgt
  1561 gggaaacgct tttcactgga cttcaatttg cgcacacatg tgcgaatcca taccggagac
  1621 aggccctatg tgtgcccctt cgatggttgt aataagaagt ttgctcagtc aactaacctg
  1681 aaatctcaca tcttaacaca tgctaaggcc aaaaacaacc agtgaaaaga agagagaaga
  1741 cccttctcga ccacgggaag catcttccag aagtgtgatt gggaataaat atgcctctcc
  1801 tttgtatatt atttctagga agaattttaa aaatgaatcc tacacaccta agggacatgt
  1861 tttgataaag tagtaaaaat taaaaaaaaa aaactttact aagatgacat tgctaagatg
  1921 ctctatcttg ctctgtaatc tcgtttcaaa aacacagtgt ttttgtaaag tgtggtccca
  1981 acaggaggac aattcatgaa cttcgcatca aaagacaatt ctttatacaa cagtgctaaa
  2041 aatgggactt cttttcacat tcttataaat atgaagctca cctgttgctt acaatttttt
  2101 taattttgta ttttccaagt gtgcatattg tacacttttt tggggatatg cttagtaatg
  2161 ctacgtgtga tttttctgga ggttgataac tttgcttgca gtagattttc tttaaaagaa
  2221 tgggcagtta catgcatact tcaaaagtat tttcctgtaa aaaaaaaaaa gttatatagg
  2281 ttttgtttgc tatcttaatt ttggttgtat tctttgatgt taacacattt tgtataattg
  2341 tatcgtatag ctgtattgaa tcatgtagta tcaaatatta gatgtgattt aatagtgtta
  2401 atcaatttaa acccatttta gtcacttttt ttttccaaaa aaatactgcc agatgctgat
  2461 gttcagtgta atttctttgc ctgttcagtt acagaaagtg gtgctcagtt gtagaatgta
  2521 ttgtaccttt taacacctga tgtgtacatc ccatgtaaca gaaagggcaa caataaaata
  2581 gcaatcctaa agcaagaata tggcagaaca agatctgtaa gcacagtctt attttctttt
  2641 gttgtccaga atacttataa ttcttgagcc tcccagaaat tggaagctaa ataaagcaac
  2701 tcaagtttcc tttattttgc actcaattac agtgattatt gatgaaagcg atgcatggat
  2761 attttaatac ttcctacatg tcctgacttc tgaaagagag taggtaacag gcatcccgag
  2821 ttcaggaact acctcagaac accccaggcc aggttggtca taggctgtga ttttagcccc
  2881 cggcaagtgt gagtgaagca tctgtaccac cgcgcaggct gagcgcctgc gcagggtaag
  2941 gtgccacctg gcagtggggc acacagaggg aagaccaggc ctgtccatca gccggctgcc
  3001 ttcagaggca gctccagcag gaccttggct tgtctgacag gaaatgcttg tggtcgttgg
  3061 ttatttggtt tgagagccct tgttcctcca tctagtggag tccttattaa atgctagcaa
  3121 tgtggcaatt gagtgccagt agcttaattt catgtttct
CBX2 (accession No. NM_005189):
(SEQ ID NO: 111)
        1 ggcggtccgg gcgggtgact ggcggcgggc gccgcggtcg ggctggctgc cgggcagcat
      61 ggaggagctg agcagcgtgg gcgagcaggt cttcgccgcc gagtgcatcc tgagcaagcg
    121 gctccgcaag ggcaagctgg agtacctggt caagtggcgc ggctggtcct ccaaacataa
    181 cagctgggag ccggaggaga acatcctgga cccgaggctg ctcctggcct tccagaagaa
    241 ggaacatgag aaggaggtgc agaaccggaa gagaggcaag aggccgagag gccggccaag
    301 gaagctcact gccatgtcct cctgcagccg gcgctccaag ctcaaggaac ccgatgctcc
    361 ctccaaatcc aagtccagca gttcctcctc ttcctccacg tcatcctcct cttcctcaga
    421 tgaagaggat gacagtgact tagatgctaa gaggggtccc cggggccgcg agacccaccc
    481 agtgccgcag aagaaggccc agatcctggt ggccaaaccc gagctgaagg atcccatccg
    541 gaagaagcgg ggacgaaagc ccctgccccc agagcaaaag gcaacccgaa gacccgtgag
    601 cctggccaag gtgctgaaga ccgcccggaa ggatctgggg gccccggcca gcaagctgcc
    661 ccctccactc agcgcccccg ttgcaggcct ggcagctctg aaggcccacg ccaaggaggc
    721 ctgtggcggc cccagtgcca tggccacccc agagaacctg gccagcctaa tgaagggcat
    781 ggccagtagc cccggccggg gtggcatcag ctggcagagc tccatcgtgc actacatgaa
    841 ccggatgacc cagagccagg cccaggctgc cagcaggttg gcgctgaagg cccaggccac
    901 caacaagtgc ggcctcgggc tggacctgaa ggtgaggacg cagaaagggg agctgggaat
    961 gagccctcca ggaagcaaaa tcccgaaggc ccccagcggt ggggctgtgg agcagaaagt
  1021 ggggaacaca gggggccccc cgcacaccca tggtgccagc agggtgcctg ctgggtgccc
  1081 aggcccccag ccagcaccca cccaggagct gagcctccag gtcttggact tgcagagtgt
  1141 caagaatggc atgcccgggg tgggtctcct tgcccgccac gccaccgcca ccaagggtgt
  1201 cccggccacc aacccagccc ctgggaaggg cactgggagt ggcctcattg gggccagcgg
  1261 ggccaccatg cccaccgaca caagcaaaag tgagaagctg gcttccagag cagtggcgcc
  1321 acccacccct gccagcaaga gggactgtgt caagggcagt gctaccccca gtgggcagga
  1381 gagccgcaca gcccccggag aagcccgcaa ggcggccaca ctgccagaga tgagcgcagg
  1441 tgaggagagt agcagctcgg actccgaccc cgactccgcc tcgccgccca gcactggaca
  1501 gaacccgtca gtgtccgttc agaccagcca ggactggaag cccacccgca gcctcatcga
  1561 gcacgtattt gtcaccgacg tcactgccaa cctcatcacc gtcacagtga aggagtctcc
  1621 caccagcgtg ggcttcttca acctgaggca ttactgaagc cccggcgcca ccagctgcgc
  1681 ggtcttactc cccttccctg cctatggtgt cgcttggcta agtgactccc agcccaagcc
  1741 ccctcaagag tctgggtcgg gggaggagga gtgggtggcc tccttgatgg gcaggcttgg
  1801 aagggacttc tcccgcaccc cactctgtcc caggacatag ggcagggggc ctcactgcct
  1861 tgttggtctc caccttgttc ctacctctgc aggcctcttt gctctcccct cttgcctcag
  1921 gaaacccggt ggcacctgtg gctccaggtg actgtcttga acagagcggg cttcttcatg
  1981 gctgcgttgt tgctgagttt gaactgctcc tccctggcct gcgtgactga atcacagctt
  2041 tggtccctgt cttgcagggg ctgaggtgtc aggaggggac ttctggccca ccttgccttc
  2101 agccctggag tgggcagaga gtattgtggg gaggcatggc cagtgggact agtgttccct
  2161 ccatctggcc acagcttttg ggagatgggg tgggcagggg tggtcctggc tggcattgcc
  2221 tgagccggca gtgatgaagt ggggagcttg cccttgacag gtgggggctg gctggggcct
  2281 taatgtgaaa agacagtggc aggcagctgg agtagagcga gcccagcagc cctaaaaggc
  2341 tgccttcatg gccatctagc cccagttcag ggcagcatcc atagcccaca agccagcgtg
  2401 ggtggggcgg gggtggtccc acagctgggt tccacctgaa gagcctccgt gcctcggagc
  2461 aggagaggca ggctatggct gccaccctcc ctcctgcctg tgtcccagtg agaactgacc
  2521 tgagtcccct tccaaaccca gacccacctc ctgccccagg cccactgaag catgttccat
  2581 ttctaaaaag cccagagttc agtgtgtccc aaggaaaacc caaagtggag gtgctcaggt
  2641 ccaggggagt ccagtgggca ggacccttgg caggcaagcc cctcccttca ctcccaggac
  2701 ctaccttctg ctagtaaagg actggcttca ttctaattat ggcccacaga ctgccccgga
  2761 gacctggagg acagcagtgc tcgcacttgg gtgtccatgg gcccgtctgc cggctctgcc
  2821 tgtgctgcaa gtgttggccg tgggtccagc caacaactcc ctacgtcctg tgtggggccc
  2881 tgcccaagtg gatgaggcat tccttgagga gtatcatttt ccctgacaat ccccatcacc
  2941 tttaggggtt ccctgcttgg ctcctttcca gctgaaaaac tagacctgtg ccattgggga
  3001 agctggacaa agtctagggg gcccgcctgg tagagggtcc cgggaagctg gatctgtcag
  3061 cctcggccct gaggcccctg ttaactcaag actgtgagct gcctctaggt ggtcacgtct
  3121 gggagctagc ttgtatggct tctgaccagt atcaggattt ctgttctgag agcagcgtgg
  3181 gcagcaaggc agggcagccc agaggtggca gcggcaggca atctggtcac taggtctttg
  3241 tgatgccaaa aataaaagag ggtggggtgg gtgctttctg ttcctctgat tggatggagt
  3301 ccgccagcag gcatggggct acattccagt gcctgactat agggaggcac tcctgattcc
  3361 atggagcagc ccggactttg agaatgggct ctggtttgcg gggggcaggc gtaccagact
  3421 gcaagacccc ccagtacctc accgtgccaa ataggaagag gtggccttgg tgtagccaaa
  3481 tggatctttt taacagtgtg cctttgggga gggacccatg tccatggctt cgttgagggc
  3541 catccatatg ccagctgggg gccagcccac agtggccata ttggctgcag caggaatggt
  3601 gcccacctcg gcgaattgaa gggctaagag tcccagatag ctaggccaga gctggaagca
  3661 gacagtaagg ggaagagctg ctcccacagg agagggagag attccagctc actgcgcagc
  3721 ctgggaggag gcgtggatcc tggcacgctg agcctcaggc accagcctcc ctgtgctcga
  3781 cagcaaagtc ttgactcctt cctgctgagc actgtgctac cttcactgct ccaaagccag
  3841 actaacagct ctccaagccc ttggggtgac tcggcttcca ggagctgttg gagaaatgag
  3901 gatgtctgtc cctgtctgcc tgggcaggcc agattcctcc ccagcagccg ggtctctcca
  3961 gaccctgatt cggtgccttt ctgtttacca gctacttcaa tcccaaagtt tgaatctgca
  4021 gataccttac tcccagccac tttgccttct tactgtgttg tgtgtttttc ctggtgcttc
  4081 aagagcgtgt gcagggcaag tgccgtcact gggaactgca ccagatgctc agacttggtt
  4141 gtcttatgtt taccaataaa taaaagtaga ctttttctat ttttatttgc tgctatttgt
  4201 gtgtgtgttt gtgtttgtgt agctaggtat ctggcacttc tgacgatgca ttgttgcttt
  4261 tttcc
CBX4 (accession No. NM_003655):
(SEQ ID NO: 112)
        1 agccggggcg ggcgcgggca gcggcgggcc ggccgggctg tgcggggcga gcggcggcgg
      61 cggcgggggc gcttcggccg gggcggcagc tgggcgccgg cgggagctag cagcgtctgc
    121 agccgcgccg gccgccagcg ccccggcgcg ctccggctcg gccatggagc tgccagctgt
    181 tggcgagcac gtcttcgcgg tggagagcat cgagaagaag cggatccgca agggcagagt
    241 ggagtatctg gtgaaatgga gaggctggtc gcccaaatat aacacgtggg aaccggagga
    301 gaacatcctg gaccccaggc tgctgatcgc cttccagaac agggaacggc aggagcagct
    361 gatgggatat cggaagagag ggccgaagcc caaaccgcta gtggtgcagg tgcctacctt
    421 tgcccgtcgt tccaatgtcc tgaccggcct ccaggactcc tccactgaca accgtgccaa
    481 gctggatttg ggcgcgcagg ggaagggcca ggggcatcag tacgagctca acagcaagaa
    541 gcaccaccag taccagccgc acagcaagga gcgggcgggc aagcccccgc cgccgggcaa
    601 gagcggcaag tactactacc agctcaacag caagaagcac cacccctacc agcccgaccc
    661 caaaatgtac gacctgcagt accagggcgg ccacaaggag gcgcccagcc ccacctgccc
    721 ggacctgggg gccaagagcc acccgcccga caagtgggcg caaggtgcgg gggccaaagg
    781 ctacctgggg gcggtgaagc ccctggccgg tgcggcgggt gctccaggca aaggctccga
    841 gaagggcccc cccaacggaa tgatgccggc ccccaaagag gctgtgacgg gcaacgggat
    901 tgggggcaag atgaagatag tcaagaacaa gaacaagaac ggacgcatcg tgatcgtgat
    961 gagcaaatac atggagaacg gcatgcaggc ggtgaagatc aagtccggcg aggtggcaga
  1021 gggggaggct cgctccccca gccacaagaa gcgggcagcc gacgagcgcc accctcctgc
  1081 cgacaggact tttaaaaagg cggcgggcgc agaggagaag aaggtggagg cgccgcccaa
  1141 gaggagggag gaggaggtgt ccggggttag cgatccgcag ccccaggatg ccggctcccg
  1201 caagctgtcc ccgaccaagg aggcctttgg agagcagccc ctgcagctca ccaccaagcc
  1261 cgacctgctt gcctgggacc cggcccggaa cacgcacccg ccctcacacc acccgcaccc
  1321 gcacccccat caccaccacc accaccacca ccaccaccac cacgccgtcg gcctgaatct
  1381 ctcccacgtg cgcaagcgct gcctctccga gacccacggc gagcgcgagc cctgcaagaa
  1441 gcggctgact gcgcgcagca tcagcacccc cacctgcctg gggggcagcc cagccgctga
  1501 gcgcccggcc gacctgccac cagccgccgc cctcccgcag cccgaggtca tcctgctaga
  1561 ctcagacctg gatgaaccca tagacttgcg ctgcgtcaag acgcgcagcg aggccgggga
  1621 gccgcccagc tccctccagg tgaagcccga gacaccggcg tcggcggcgg tggcggtggc
  1681 ggcggcagcg gcacccacca cgacggcgga gaagcctcca gccgaggccc aggacgaacc
  1741 tgcagagtcg ctgagcgagt tcaagccctt ctttgggaat ataattatca ccgacgtcac
  1801 cgcgaactgc ctcaccgtta ctttcaagga gtacgtgacg gtgtagccgg agggcgtcgg
  1861 aaggggaagc gccattcccg cgggggggcg gggagctgag cacctggggc ctcggggcgg
  1921 gctcccctct cgccaacccg ccaaccgcga gagacccagg ctggccccca gggtgaggac
  1981 gcccggagcg gaggtaacca tgttccccct gcggcggctg tcagacctgg gcggaggccc
  2041 cttccacgcg gtgccggcgg ggctcgccct ctcctgccct tccccgctgg agatggaccc
  2101 ccggaacgga cagggcagct ctgcgcccgg cctcagagtt ctagtattat attttaaccg
  2161 tgctaacttg tcaagtgctg actctactcc cgtttgtacg tggtgttatt attgaaatgt
  2221 attgtttgag ctcaaaaggc ccgaccaccc cccttcgggc tgctatatat atatttattt
  2281 gtaggtattt atatattgaa atataaaaac ctagatttat ggagtttcct ctagatcatg
  2341 ttatattcta tatcagacaa actattttct tttgaccttt cttcccctcc atccagtatt
  2401 tcggttgatt tcattttctc ccctctcttc cccttccacg aactgcaata ccagtaacct
  2461 tggtatatat tttttgatac tgtacacatg gatgtcttgt ttctatgtgc aaaaaaaaaa
  2521 aaaaaaaaaa gtttgttaaa aggctacacg agctctctag aaactgctgc tactagaaat
  2581 gtctaaacta taagcttcca actattacct gcttgaatgt aaatattaaa tggagatgtt
  2641 gaaggtgcaa aaaaa
CBX6 (accession No. NM_014292):
(SEQ ID NO: 113)
        1 gtgacggccc gcagctggaa cgcgagcgcg cgccccgccg cgctcccgcc cgccggggcc
      61 tgggcgctgc ggcgcgtgcg cgagcggtgc cgcaccggcc gcgggcgcag ggagtattat
    121 gggctgtggg tgccgctgag caagatggag ctgtctgcag tgggcgagcg ggtcttcgcg
    181 gccgaatcca tcatcaaacg gcggatccga aagggacgca tcgagtacct ggtgaaatgg
    241 aaggggtggg cgatcaagta cagcacttgg gagcccgagg agaacatcct ggactcgcgg
    301 ctcattgcag ccttcgaaca aaaggagagg gagcgtgagc tgtatgggcc caagaagagg
    361 ggacccaaac ccaaaacttt cctcctgaag gcgcgggccc aggccgaggc cctccgcatc
    421 agtgatgtgc atttctctgt caagccgagc gccagtgcct cctcgcccaa gctgcactcc
    481 agcgcagccg tgcaccggct caagaaggac atccgccgct gccaccgtat gtcccgccgt
    541 cccctgcccc gcccggaccc gcaggggggc agccccggac tgcgcccgcc catttcgccc
    601 ttctcggaga cggtgcgcat catcaaccgc aaggtgaagc cgcgggagcc caagcggaac
    661 cgcatcatcc tgaacctgaa ggtgatcgac aagggcgctg gcggcggggg cgccgggcag
    721 ggggccgggg cgctggcccg ccccaaagtc ccctcgcgga accgcgttat aggcaagagc
    781 aagaagttca gcgagagcgt cctgcgtaca cagatccgcc acatgaagtt cggcgccttt
    841 gcgctgtaca agcctccgcc cgcccccctg gtagccccgt cccccggcaa ggctgaggcc
    901 tcagccccgg gccctgggct acttctggcc gcccccgccg ccccctacga cgcccgcagc
    961 tctggctcct ccggctgccc ctcgcctaca ccacagtcct ctgaccccga cgacacgccc
  1021 cccaagctcc tccccgagac cgtgagccca tccgccccca gctggcgcga gccggaggtg
  1081 ctcgacctgt ccctccctcc cgagtcggca gccaccagca agcgggcacc gcctgaggtc
  1141 acagctgctg ccggcccggc acctcccacg gcccctgagc ccgccggtgc ctcctccgag
  1201 cccgaggctg gggactggcg ccccgagatg tcaccctgct ccaatgtggt cgtcaccgat
  1261 gtcaccagca acctcctgac ggtcacaatc aaggaattct gcaaccctga ggatttcgag
  1321 aaggtggctg ctggggtagc aggcgccgct gggggcggtg gcagcattgg ggcgagcaag
  1381 tgagggggct ccaccaagga ggggggcttg ggggggccct cctgcccgaa gtcatactct
  1441 tgctcccacc ccacccttgc ccccagccct ctctccctgt gctttgcttg tctcaaatgg
  1501 ctcggtgttg acccagggat ggggctgggt agttggggtc ccagaaagcc gggggtaggg
  1561 gccaccctgg aatggggcag gggaagggca caccccctgc ccatgcatgg tagcccactg
  1621 ggtggtttct ggaaagccct agaaactagg gttcctctgc cccttccaca tcccacctgt
  1681 ctctctagct tgcttcctgc tctcctgtgc ggcgtctgat ttctcggtgc taacctggca
  1741 gctgtggggc ccttaggagc cccccaccga gggtggacac agtccctttc cttcctgcag
  1801 atgcctaggc aggaggaggg cttcctgcct gtttggcaaa gtcccaggca gaggccaagg
  1861 atgaggcctg actcggctcc tccctccaca tcagccaggg catcagaagt tgggccaggg
  1921 cggggtcttc cctgctcgat tttggacgag gcctaagtag accccctatg ccctgcccca
  1981 gccctggctc tttcctaacc ccctcaacgg tgggaggaac tggcagaggg tgcgcctggc
  2041 cacagcctcc ccgcatctaa aggccccttc agttcttgac caaaggtgct acgagaacct
  2101 gccgtggaaa cttccagttg tgcgtctgcc ccactcgctg tgtttgtccg tgggttcata
  2161 catgcattgg gtgctaggcc ccaggctgcc gggtggcacc ctttacagtt cctttgaaca
  2221 ggggcattga aggcctggac tgcctctcgc ctcagtaggc ctggggacca ggcttgggtc
  2281 tggaggtttg ctgtggaagt caccaggcct cccctcctgg cccaggtgtg ctgggggcac
  2341 cgtgcccccc acccccctgc cctcctcagg gtggtcagcc caacctgtcg gaccttcact
  2401 tcacatcatg gtggggaccg agatagagag ggagacccca ttccaagctc cctcttcctc
  2461 cgggtgtttg gggaggatgc tgaagaatcc attcccgagg gcctcccggc ttgtcccagc
  2521 ccctcttttg cttctgacca cggaggcttt ctcacagccc agcctgcctg aagcaaagga
  2581 ggctcccgtg tcctgggcag cttctgtttc cctctgctgc ctgggagctg aggcacccgt
  2641 gccagtggca gaggccacag ccccagcctt aggccaggcc ctgggagggc aggcaggcaa
  2701 aggggagacc agagggtctg tgttctccag gagaatgagg gtgttggtcc cagaattggg
  2761 accggggccc cgctggccag ccctgggcca cttcccgggt ctccattgtg cgtgggtggc
  2821 gtgttccagg cgtggctgga gctggcttcc tggctgtgct gccatgggcc cctccctcag
  2881 aagcacgttg gcaggaggcc gatcagaacc ctagcgcctt tggtcctaag aatgggaggc
  2941 tgccttcctt cccaatctcc ctgccagggc ccacagcgtg gccctagccc tcccctcccc
  3001 gggatgtaga acggggaccc tcgcagggtt ggggcggggg ctgatactcc tcggcccctc
  3061 cctaccctgc cctgtgtgtt ggctttgtgg ccgtccaagt gccaattggc ttttcgccca
  3121 aataagggct ggtatttctc ctctgtcctt ggaggtgatt tccccctgac cccctccccc
  3181 aggtgagtga ccacctgggt gccagttaca ggtgtttcca gagaccatag aaatgtgttt
  3241 tcctgagagt tcgtgtcatt cgtgactttt ttgtaaagaa gttgtgtttt cagaggtgat
  3301 tttatgacag gaaagtgaaa gaattagttt tgcaaaaaaa caaaaacaaa aaaagaggaa
  3361 aaaaaaaaga aatagaaaaa aatattgtgg gattcctatg ggggggtggc gggggagaaa
  3421 gagctattta agaaaaaata gtaacgcagt gattgcacag gtgaggtggc aatgtcagga
  3481 tggggcggag gcctgggccc agctggcagg tcccctggca tcgcaggcac tgtggagagg
  3541 gcctggaccc agatctccac acccgtgctt gctcaaaggg aaggacaaca gcgggccccc
  3601 gggagctaac ccaagctgca ggtcccggca agctgaggtt tgggagggtg ggggttgtca
  3661 ctggtgattt tctccagggg gctggtgagt gggcagtttg gtttcttgcc cccttctgtt
  3721 cctttcccag ttgttgggcc atctggtccc caccaccgcc accctatggg ggagacctcc
  3781 ctccccacgg gtcaccctaa agcccacaac ctctctgagc ctccctggcc tgaaagggga
  3841 tgcaggcttc aggaggcaag aagctgggcc cctgggggtg gctggggaga gggaatgcat
  3901 ttcccttgcc acaggtggtc tgcttctgct ggcctgagct ccaagtggag cagcccgggc
  3961 cagccttggt gcatgaagag gcaccaggca caccgccttg aggtgggcag tgcccatggg
  4021 ggcccgagtg gatgggaccg agggtgagtg gagcctcctt cctcccctct ctagtacccc
  4081 cgcctcccac acacttgcac ggatcggcct cccttgggag atcagcctcc atgggcccct
  4141 cgtccaccct tgctgctttc catttgccta attaccaagc agaagttgca atctggtttg
  4201 ctttattttt gtatgtgaaa taacccccaa agcccaatct cctcctacgt tcaatattgg
  4261 ttggggcatc cgtcatctcc ccttaagtgc gccccctccc cacccaagta tcataggaaa
  4321 ccggtgaggt ctggtgtctc tggtttgaga cggtaagttg ggacccatcc ctgtctgggt
  4381 gcccactctg acctttagtt tgcccttctg tgaaatgggt gtattgggta gcaagccctc
  4441 ttcagaaagc gctgctggtg tcagagcagc tgcccagtac caggtggggg gtcaaggttg
  4501 ctggtactgg ggcccccagc tgcccacaac ccctctttgt tctcaccctg caaaggggtc
  4561 aaggtcaaaa tgagcctcat ccttcctatg atctgggaag aggtgatgat caagtcccca
  4621 acttcagtgt gaggtggaca gagttggggg gatggcccct ttttgaagag gtgaaaatgg
  4681 ttttggagaa gcgcagctgc ttcactgggg gaatgcggca gggactgggg cccaggatgc
  4741 tttggcctat ggggaaaagc cctttaaaag gcagggccca ggccctggag ccagcacaag
  4801 actggcctcg agcccctgag ccaggaggtc ctggaggaga gccaggccgg tgggcccgcc
  4861 caaggctgga gggtcagccc caacagggag ctgggttggc cagggggctg gactgctacc
  4921 agcctctctg gcctatgggg acccaagagg acacatcccc cttttgccca ctcttctgtg
  4981 tcattttgtt gttttggttt gtggtggttt ttcttttttc ttttgttttt cttttttctt
  5041 tctttctttt tttttttttt tttttttttt tttgcacttc gcccacacag gacagtggag
  5101 ccccacctgg tcagttccac ttccgggctc ccatgcactt gcccaaggcg gcctctttgg
  5161 gacggggatg gtttgaggaa acacttttaa agaaaaaagg aagacattga aaggttttag
  5221 tttcttccct atctgcatgt cctctcatat agaaagccca gaattagggg ctagaactcc
  5281 aggagagggt ctccccgact catctcttgc tgacggtcac caggatgcag aaatagggag
  5341 atggttagtg ggggccaaag atgccccctc ccaggccttc gtggttccct cctccgcccc
  5401 ctgcaatctt tggaggagtc agtgcctcac tccagcagtg agtgcctact gtatgcaggt
  5461 agtcagccag gcaaagagag actaacggtc tcatggggga accctcttgc gggaggccgg
  5521 gtagctggag cgaagcgttc cggctgccct tgctgctggg tggagtggag agggagactt
  5581 ctttttgttg gttttaattt aaaaacacaa aggcctaaag aaatacgtat cttataattt
  5641 ttttaatttt tgagacgttc atttaatgaa ttgtgcacga atgaattcta tatatataaa
  5701 atatacatat atagctctat atttggggag gggcactgtc tcttttttct ctcattttta
  5761 aaatgaagtg ttgttgcctt tgtatgtggt tcaaccatcc agctcccagc tggctaaact
  5821 ttgcctccag tggtcaaaga tgggaaaaga gtggggttgg caggagatgg aaaacggagg
  5881 tgccgcccca gcatgggggg caggtccccc agtccaccct gcccctcccc ctgtggagaa
  5941 gacgcttagt tgggggtgtg ggtttgggct ccattctgga ttcggcggtt ccgggggagg
  6001 ggtgggtctg tgccgattac tctgtcttgt acgtttgttc tgctgctctt caatattgta
  6061 tcaacgccag gaaagggggg tgaaaagcct cttttacccc ccaaataaat tgtcacattc
  6121 cgaagctgag gcctagcccc taggttgggg tgtgtctgtg tcttc
CBX7 (accession No. NM_175709):
(SEQ ID NO: 114)
        1 ccagccccag catcgcgcgc cgcagccgcg gccccgcagc tccgcccccg gcccggcccg
      61 gccccgggcc cgctcgcccg ccgccccgca tggagctgtc agccatcggc gagcaggtgt
    121 tcgccgtgga gagcatccgg aagaagcgcg tgcggaaggg taaagtcgag tatctggtga
    181 agtggaaagg atggccccca aagtacagca cgtgggagcc agaagagcac atcttggacc
    241 cccgcctcgt catggcctac gaggagaagg aggagagaga ccgagcatcg gggtatagga
    301 agagaggtcc gaaacccaag cggcttctgc tgcagcggct gtacagcatg gacctgcgga
    361 gctcccacaa ggccaagggc aaggagaagc tctgcttctc cctgacgtgc ccactcggca
    421 gcgggagccc tgagggggtg gtcaaggcgg gggcacctga gctggtggac aagggcccct
    481 tggtgcccac cctgcccttc ccgctccgca agccccgaaa ggcccacaag tacctgcggc
    541 tctcgcgcaa gaagttcccg ccccgcgggc ccaacctgga gagccacagc catcgacggg
    601 agctcttcct gcaggagcca ccggccccag acgtcctgca ggcggctggc gagtgggagc
    661 ctgctgcgca gccccctgaa gaggaggcag atgccgacct ggccgagggg ccccctccct
    721 ggacacctgc gctcccctca agtgaggtga ccgtgaccga catcaccgcc aactccatca
    781 ccgtcacctt ccgcgaggcc caggcagctg agggcttctt ccgagaccgc agtgggaagt
    841 tctgaatcac cgtttttact cttcttaaac tgttttcttt tgggcttggg gtgggacttc
    901 cagagatagg gatgggttgg gggcggggta attattttat ttaaaaaaat accgagcagc
    961 aaaaggggag aagatcccac tactctccca ccacctgccc tttctctgag ggacgtttac
  1021 cacgaggcct caggctgggg atggagagag ttgctctggg agttggggta ccacccccag
  1081 ggcaggatgg ggacaggatc acctgcccgg gacaccacca ttatcattct cctctagtga
  1141 cgcagcagct ggttctggga gttaaaggag cattggaagg cccaaaccct ctcccttgag
  1201 tggccacccc agcctggttg gctggttttc cccttttctc ttgtttcaat tgggtcttta
  1261 ccttgaactc tcctctctgg ctttgcggtg ggctgtggag gctggttttg accaaaagtg
  1321 agtggggcgg gaggaagggg caggaggaag ggttgaggtt acttggggcg agtcccttcc
  1381 ccttcagaga ggcttctatc cttcccaggg aggaggcgcc gctgagaccc ttctgctgag
  1441 agctctgccc tcccctcatc acctggcctg tgcagaaacg ctcatgcaca cctggctgca
  1501 caggtgtgca cgcattaccc ttcgcgtgta cgttcccatg tgccccgtga aagcatgtgt
  1561 ggctgcagac gtgtccacat gggccttgcg aacctgggtt agaaaccctg gccaggcgaa
  1621 cgtggggtga ttcacagcac aaaagacctc accaccacac ctgcactcac cccaccttgc
  1681 atgcaccttg ctacctgctt gcggctttca gtggagggca ggggtctggc acaggtgcga
  1741 tggcacccca tgctccaggc atacagatgt ggtttctcgg ctgcaccggg ccaggctgcg
  1801 ggtgtgcagg cgtctgctaa gttgtgtgat gtatcagcac aggctttgag acgtctggac
  1861 cctgtccttc ctcccgtgag gggttcttgt tctttctgac tcaggtgact tttcagccct
  1921 tccaattccc ctctttttct gccctcccct ccaactcagc caacccaggt gtgggcagtc
  1981 agggagggag ggagtgtccc accacgttct cagggcagcc cttgactcct aagccccttc
  2041 ctccttccat tctgcatccc ctccccatcc aacctaaatg ccacagctgg ggctgagctg
  2101 tattcctgtg gagggacctc tgccgtgcct ctctgaggtc aggctgtgct gtgtgatggg
  2161 caggctttgc cccagcccac ccctggcaag gtgcacttgt tttctggttt gtacaaggtg
  2221 tcctgggggc ccgtggcttc cctgccagtg aggagtgact tctccctctc ttccagtcct
  2281 gtaggggaga caaaaccaga ttggggggcc caaggggagc atggaaaagg ccggctcccc
  2341 tgtctttcct tggctgtcag agtcagggta acacacacca agagtggagt gcggccagca
  2401 agtttgagac ctgcccgccc tcctcgcagc tctgctctgt gtcctcagga agtcacagag
  2461 tctactgagg caaggagagg gtgattcttt ccccaaatcc cttcttccct ggttcccaaa
  2521 ccaaagacag cctgcagccc tttctgcatg gggtgctctg ttgacaggct tcccagatcc
  2581 ctgagtctct ctttccttcc tcctcgatct ttagttgtcc acggtcaatt cagtgcttcc
  2641 attgggggac agtcccctcc gggatgacct gattcacctc cagcccaggg aatggaatct
  2701 agaggaatac gtggggtggg tctggacaag gagcggcagg aatcaccacc catctccagc
  2761 tgtggagccc tgtggagggg aaggggaagc ttggggttca gaggggactc ttccaggaga
  2821 ggggtgccca gcggaggtaa agatgataga gggttgtggg gggtctctag ttgaatgttt
  2881 tggcccatga ctttggaaca tggctggcag cttccagcag aagtcacgct ccccatcccc
  2941 caggggacat aggacctttt tcctgcttcc tggtcacttt caaagaacta tttgcgcaat
  3001 ctgtgggtct gtggattcac ggggctttct gtgtgggtgc tgcagttgct tttgtctgca
  3061 gcagcaggac acatctttcc tcttactcag ccctttatgg cccatgggga actccgtggc
  3121 tcagggagag ctgaactcca ggggtgtgac ctgggacggg tgggcctgag gtgcccagct
  3181 cagggcagcc aggtggctca tgggctgtag tgagccagct ccctggggga aaaggctgtg
  3241 ggccgttagg accatcctcc aggacaggtg acctctatga ggtcacctac ggctgtggcc
  3301 gtgcaggcct ccttccagcc cagagtggcc cagtagagca aggcagacag tgacctccac
  3361 ccccgcagcc ctcttaaaag gccagtactc ttgggggtgg ggggagggtt tagaaagcat
  3421 ttgcccatct gcctttcttt cccccagccc ccacccgctt tgaatgtaga gacccgtggg
  3481 cacttttcct tttgtggtgg ggggtgcgga ggaggtaccc ccacccctgg cacagccgcc
  3541 tggaatgcag gactgtcact gctgttcggg tgatgacctc gttgccaagc tcctcctgtc
  3601 cccttgttct gggggcaggc gctgtgcttc tgtgaggtgg tttagctttt gctttcgaag
  3661 tggccagctg cggccaccag gtctcagcac aagagcgctt cctttgcaca gaatgagctt
  3721 cgagctttgt tcagactaaa tgaatgtatc tgggaggggt cgggggcacg agttgattcc
  3781 aagcacatgc ctttgctgag tgtgtgtgtg ctgggagagt cagagtggat gtagagcgcg
  3841 gttttatttt tgtactgaca ttggtaagag actgtatagc atctatttat ttagatgatt
  3901 tatctggtaa atgaggcaaa aaaattatta aaaatacatt aaagatgatt taaaaaaaag
  3961 aaaa
PHC1 (accession No. NM_004426):
(SEQ ID NO: 115)
        1 cccgccgcgg aggccgagcg agcccccagc ccagcctggc gactggggac cccggcacat
      61 gaggtggacg cccccgggga agacttgggt gcacagccag gcgagaaggt cttgagtcag
    121 acagagcacc agccttgggg accctggacc actatcatgg agactgagag cgagcagaac
    181 tccaattcca ccaatgggag ttctagctca gggggcagct ctcggcccca gatagctcaa
    241 atgtcacttt atgaacgaca agcagtgcag gctctgcaag cactgcagcg gcagcccaat
    301 gcagctcagt atttccacca gttcatgctc cagcagcagc tcagtaatgc ccagctgcat
    361 agcctggctg ccgtccagca ggccacaatt gctgccagtc ggcaggccag ctccccaaac
    421 accagcacta cacagcagca gactaccacc acccaggcct cgatcaatct ggccaccaca
    481 tcggccgccc agctcatcag ccgatcccag agtgtgagct ctcccagtgc taccaccttg
    541 acccaatctg tgctactggg gaacaccacc tccccacccc tcaaccagtc tcaggcccag
    601 atgtatctac ggccacagct gggaaaccta ttgcaggtaa accgaaccct gggtcggaat
    661 gtgcctctag cctcccaact catcctgatg cctaatgggg cggtggctgc agtccagcag
    721 gaggtgccat ctgctcagtc tcctggagtt catgcagatg cagatcaggt tcagaacttg
    781 gcagtaagga atcaacaggc ctcagctcaa ggacctcaga tgcaaggctc cactcagaag
    841 gccattcctc caggagcctc ccctgtctct agcctctccc aggcctctag ccaggcccta
    901 gcggtggcac aggcttcctc tggggccaca aaccagtccc tcaaccttag tcaagctggt
    961 ggaggcagtg ggaatagcat cccagggtcc atgggtccag gtggaggtgg gcaggcacat
  1021 ggtggtttgg gtcagttgcc ttcctcagga atgggtggtg ggagctgtcc cagaaagggt
  1081 acaggagtgg tgcagccctt gcctgcagcc caaacagtga ctgtgagcca gggcagccag
  1141 acagaggcag aaagtgcagc agccaagaag gcagaagcag atgggagtgg ccagcagaat
  1201 gtgggcatga acctgacacg gacagccaca cctgcgccca gccagacact tattagctca
  1261 gccacctaca cacagatcca gccccattca ctgattcagc aacagcaaca gatccacctc
  1321 cagcagaaac aggtggtgat ccagcagcag attgccatcc accaccagca gcagttccag
  1381 caccggcagt cccagctcct tcacacagct acacacctcc agttggcgca gcagcagcag
  1441 cagcaacaac agcaacagca gcaacagcag cagccgcaag ccaccaccct cactgcccct
  1501 cagccaccac aggtcccacc tactcagcag gtcccacctt cccagtccca gcagcaagcc
  1561 caaaccctgg tcgttcagcc catgcttcag tcttcaccct tgtctcttcc acctgatgca
  1621 gcccctaagc caccaattcc catccaatcc aaaccacctg tagcacctat caagccgcct
  1681 cagttagggg ccgctaagat gtcagctgcc cagcaaccac caccccatat ccctgtgcaa
  1741 gttgtaggca ctcgacagcc aggtacagcc caggcacagg ctttggggtt ggcacagctg
  1801 gcagctgctg tacctacttc ccgggggatg ccaggtacag tgcagtctgg tcaggcccat
  1861 ttggcctcct cgccaccttc atcccaggct cctggtgcac tgcaggagtg ccctcccaca
  1921 ttggcccctg ggatgaccct tgctcctgtg caggggacag cacatgtggt aaagggtggg
  1981 gctaccacct cctcacctgt tgtagcccag gtccctgctg ccttctatat gcagtctgtg
  2041 cacttgccgg gtaaacccca gacattggct gtcaaacgca aggctgactc tgaggaggag
  2101 agagatgatg tctccacatt gggttcaatg cttcctgcca aggcatctcc agtagcagaa
  2161 agcccaaaag tcatggacga gaagagcagt cttggagaaa aagctgaatc agtggctaat
  2221 gtgaatgcta atactccaag cagtgaacta gtagccttga cccccgcccc ttcagtaccg
  2281 cctcctacac tagccatggt gtctagacaa atgggtgact caaaaccccc acaggccatc
  2341 gtgaagcccc agattctcac ccacatcatt gaaggctttg ttatccagga aggagcagaa
  2401 cctttcccgg tgggttgttc tcagttactg aaggagtctg agaagccact acagactggc
  2461 cttccgacag ggctgactga gaatcagtca ggtggccctt tgggagtgga cagcccatct
  2521 gctgagttag ataagaaggc gaatctcctg aagtgcgagt actgtgggaa gtacgccccc
  2581 gcagagcagt ttcgtggctc taagaggttc tgctccatga cttgcgctaa gaggtacaat
  2641 gtgagctgta gccatcagtt ccggctgaag aggaaaaaaa tgaaagagtt tcaagaagcc
  2701 aactatgctc gcgttcgcag gcgtggaccc cgccgcagct cctctgacat tgcccgtgcc
  2761 aagattcagg gcaagtgcca ccggggtcaa gaagactcta gccggggttc agataattcc
  2821 agttatgatg aagcactctc tccaacatct cctgggcctt tatcagtaag agctgggcat
  2881 ggagaacgtg acctggggaa tcccaataca gctccaccta caccggaatt acatggcatc
  2941 aaccctgtgt tcctgtccag taatcccagc cgttggagtg tagaggaggt gtacgagttt
  3001 attgcttctc tccaaggctg ccaagagatt gcagaggaat ttcgctcaca ggagattgat
  3061 ggacaggccc ttttattact taaagaagaa catcttatga gtgccatgaa catcaagctg
  3121 ggccctgccc tcaagatctg cgccaagata aatgtcctca aggagaccta aggtggccct
  3181 cttgcacaaa ccagcctaag gcagacactc tccactgtcc aggttataac ctggtaccag
  3241 cagactttgc agggaagaaa gagttgttcc aatcatgtaa ccttctgtag gggattactg
  3301 agacagggaa gagaagtgca agaattggtt gctggtgcta catggcggca gctttgacat
  3361 tttctctggg ttctacttta ttttttaaaa tctttacagt tctcaccatt tcacgtacct
  3421 taatccaatc tttataaaag aggcagtcta gagaactagg actgctcagc cttatcctgg
  3481 agtggagcat ttagcccagg tcttaattct ccaagaggag gaatacatag tatggtaagg
  3541 caaggaactg ggtggaatgt caggttgcct gcccaatggg agaggtaggg tttttctagc
  3601 ttgtgtgaca gaagtagcaa aatctggtcc tcccccctcc cagtgtagct gtggctcaga
  3661 gttttttctt tttgttgtca cttactccct tgtgattgaa ttttttctcc tgcatccatg
  3721 gcaggatccc cagccagtat agagacttgg ttggcatctt ctgctgcagg gactaaaagt
  3781 atttgactgg ggcacatgtg gctgttgtca ttctttctgc atcccactgt tcccctccaa
  3841 tttatgttat tttctaccct gtttttcagt tccatctctg ctctgtccta tagctttata
  3901 aaaccagagt gtgtggggct gaggtcagga gtataagtac ctgccttagg cactattcct
  3961 tatataacaa aaatattaaa tatttttttc ctcagtaaaa ggatgaaaat tggtttcagt
  4021 tgtcttactc tattccagtc tttgcccact ttcacacaaa tgacaaggcc aatatgtttt
  4081 gtttgttttt taatcattaa gagtttttgt acaaaaggtg atggtttttt ttcttcattt
  4141 taaaacacca gggtgtgggg gagggatgca aacaaataac aaaaaagatg cttttgtaac
  4201 attattttcc ctgtttagaa agaaaaaaat cactccaata gtattgaaaa gtccaaagat
  4261 gaaatagttt cattttcttt tcctaaggct tataaaaggc cccctgcctg ttgattccat
  4321 ccctcttttg tgtccagtgg agccatgtta ctcttcagtg gcccaggggt tcactattaa
  4381 agaaagatca gtccaggttt ctgggcacat ggcctaaaca ggaagatgga agcatcagag
  4441 gattaaaaac ctttccccac agaaatgtgg gcaagaagac acttccctga gccagcagaa
  4501 gggacaggtg cagcagcatt ccacacccag cgcagaggac agcagagccc tcgatgtccc
  4561 acttctgctt ccgttccctt tctagaagat tgaaaaaaag gtcaaaacca catgcctgtg
  4621 gagaaagtgc gacatgttta gaaatactgg tagggaacca ggagtaagaa aagctttacc
  4681 agcttttact acaaatggat gaaagacatc aggatcccac caccgcaagg taaagtgact
  4741 tcccttttct ggaacccctg tggcacagga gtaccaattt tcctttccaa cgaactggat
  4801 ttctggatag gcattttggc tgtatgtgga cagataagac cacagtcctt agcccaatcc
  4861 cagctataca gtcaccccaa tttccacaaa tgatgtgatg gtaccgtata atcctgtaat
  4921 tgggaaattt cacatttttc ctgtcctaat ctcagaggtg ggagaagcaa gtctagaaca
  4981 tctccaggct cagactaaac gagagtactt ggactgcaac caagtaatca ctgcaaagta
  5041 gttccaagca gcaagaaata ccagattctc atggaggcta ctatagggta cagaataaca
  5101 acatgaaagc aatcaaccct gtataaataa tgtttcttgg catttttttt ttaattaaag
  5161 aaatccagtg tctcaaaaaa aaaaaaaaaa aaaaaaaaaa aaaaaa
PHC2 (accession No. NM_198040):
(SEQ ID NO: 116)
        1 catctgcctg cccttctgcc atccgagcgc cctgactgcg ccacactgca ggccatggag
      61 aatgagctgc cagtcccaca tacatctagc agtgcctgtg ccaccagcag taccagcggg
    121 gccagtagca gcagtggctg caacaacagc agcagtggtg gaagtggccg ccccaccggg
    181 ccccagattt ctgtgtacag tggtattcca gaccggcaga ccgtgcaggt gatccagcag
    241 gccctgcaca gacagcccag cacggccgct cagtacctgc agcagatgta cgccgcccag
    301 cagcagcacc tcatgctgca gaccgcggcg ctccagcagc agcacctcag cagcgcccag
    361 ctccagagcc tggcagccgt acagcaggca agcctggtat ccaatagaca aggaagcact
    421 tcaggcagca atgtgtctgc gcaggccccg gcccagtcat cttcgatcaa cctggcagcc
    481 tccccagcag cagcccagct cctcaaccgg gcccagagtg tgaactctgc agcagcctca
    541 ggcatcgctc agcaggctgt gctcttgggc aacacgtctt ccccagccct gactgcaagc
    601 caagcacaga tgtatctgag ggcacagatg ctcatcttca cgcccacggc caccgtcgct
    661 actgtgcagc ctgagctcgg cactggctcc cccgcccggc cccccacccc cgcccaggta
    721 cagaacttga ccctccgaac acagcagaca ccagcggcag cagcctcggg ccccaccccc
    781 actcagcctg tcctgcccag cttggccctg aaacccacgc cgggcggtag ccagcctctg
    841 cctaccccag cacagagcag aaatactgct caggcttccc ctgcaggtgc caagcctggc
    901 atagctgaca gtgtgatgga gccacacaag aaaggagatg gcaacagcag tgtgccaggg
    961 agcatggaag gccgggctgg gctcagccgg acggttcctg ctgtggctgc ccaccccctc
  1021 attgcaccag cctatgctca gctgcagcca caccagctcc tcccacagcc atcctcaaag
  1081 cacctgcagc cccaatttgt gatccagcag cagccacagc cacaacagca gcagccgccg
  1141 ccccagcagt cacggcctgt gctccaagct gagccccacc cccagctcgc ctcagtctct
  1201 ccaagcgtgg ccctccagcc cagctcagag gcccatgcca tgccactagg cccggttaca
  1261 cccgccctgc cactccagtg tcccactgcc aacctgcaca agcctggcgg cagtcagcag
  1321 tgtcaccctc ccacacctga tactgggcct cagaatggac atcccgaggg cgtgccccac
  1381 acccctcaac gcaggttcca gcacacttca gctgtcatct tacaactgca gcctgcttca
  1441 ccaccccagc agtgtgtccc tgatgactgg aaagaagtgg caccagggga gaaaagtgtg
  1501 cctgagacgc ggtctggccc atcaccacat cagcaggcta ttgtcactgc catgcctggt
  1561 ggcctgcctg tacccacgag ccctaacatc cagccgtccc cagctcacga gacagggcag
  1621 ggcattgttc atgcactgac cgacctcagc agccccggca tgacctcagg gaacggaaac
  1681 tctgcctcca gcatcgccgg cactgccccc cagaatggtg agaataaacc accacaggcc
  1741 attgtgaaac cccaaatcct gacgcatgtt atcgaagggt ttgtgatcca ggagggggcg
  1801 gagcctttcc cggtgggacg ctcgtccctg ctggtgggga atctcaagaa gaagtatgca
  1861 caggggttcc tgcctgagaa acttccacag caggatcaca ccaccaccac tgactcggag
  1921 atggaggagc cctatctgca agaatccaaa gaggagggtg ctcccctcaa actcaagtgt
  1981 gagctctgtg gccgggtgga ctttgcctat aagttcaagc gttccaagcg cttctgttcc
  2041 atggcttgtg caaagaggta caacgtggga tgcaccaaac gggtgggact tttccactca
  2101 gaccggagca agctgcagaa ggcaggagct gcgacccaca accgccgtcg ggccagcaaa
  2161 gccagtctgc caccacttac caaggatacc aagaagcagc caacaggcac tgtgcccctt
  2221 tcggttactg ctgctttgca gctaacacac agccaggaag actccagccg ttgctcagat
  2281 aactcaagct atgaggaacc cttgtcaccc atctcagcca gctcatctac ttcccgccgg
  2341 cgacaaggcc agcgggacct ggagctcccc gacatgcata tgcgggacct ggtgggcatg
  2401 ggacaccact tcctgccaag tgagcccacc aagtggaatg tagaagacgt ctacgaattc
  2461 atccgctctc tgccaggctg ccaggagata gcagaggaat tccgtgccca ggaaatcgac
  2521 gggcaagccc tgctgctgct caaggaggac cacctgatga gcgccatgaa catcaagctg
  2581 gggcccgccc tgaagatcta cgcccgcatc agcatgctca aggactccta gggctggtgg
  2641 cagccaggat tctggcccag ggcgcctcct cccgactgag cagagccaga cagacattcc
  2701 tgaggggccc agaaatgggg ccggttggag ggcaggggct ctccctaggg gcatagctgg
  2761 tgaggaggtc tgggcacctc ctccatggct ctcaggggcc tttcatttct gtgggagggg
  2821 cagagaggta ggtggcacag aagatggggc tttatgcttg taaatattga tagcactggc
  2881 ttcctccaaa gtcccaatac tctagccccg ctctcttccc ctctttctgt cccccatttt
  2941 ccagggggta tatggtcagg gctccccaac ctgagttggg ttacttcaag ggcagccagc
  3001 aggcctggat ggaggcctag aaagcccttg ccttccttcc tcccacttct ttctccaggc
  3061 ctggttaact cttccgttgt cagcttctcc cccttcagcc tgtttctgca gcagccaggg
  3121 ttctcccccc tacaccctct gcaggtggag agagagaagc tgggcccagc cgggccgtgc
  3181 ctgctggcac agacgcctta acgctgtgtg tatgactgtg tgactgtgtg ggagcctgga
  3241 ctgacagata ggccaagggc tactctctgg catctccagg tgttttgtag caaacagcca
  3301 cttagtgctt tgtcctggac tccactcagc ctcaggatgg ggaatagcca agaatggcag
  3361 cctcagcgca gaggcaaggt cagaaagaga cggcgcttca gagtttcctt tccagacacc
  3421 cctccccgca ctgtgaagtt cccctgaccg ccctcctggt tcacaaagag cattaagaaa
  3481 gctgcggtgg tctgagcaac atagcccaaa gggctgagcc tcctggcctg cctgcccgcc
  3541 caccctggga gtcccagtgg tgaggctcag agaactgcta aggggaaaga acagctggag
  3601 tttctgttga tgtgaagaag gcagctcttg gcctcccact cccacacttc tttgcctata
  3661 aatcttccta gcagcaattt gagctacctg aggaggaggc agggcagaaa gggcgagggc
  3721 ctgcctctga cctgccgtgt cctttgcagg aaggaggtag gcacctttct gagcttattc
  3781 tattccccac ccacaccccc aggcagggtt ggaaatgaag gactttttta acctttgttt
  3841 tgttttttaa aaataaatct gtaaaatctg tct
PHC3 (accession No. NM_024947):
(SEQ ID NO: 117)
        1 atgcgcagcc catgttagtg atggaggaga gaagatggcg gaagcggaat ttaaggacca
      61 tagtacagct atggatactg aaccaaaccc gggaacatct tctgtgtcaa caacaaccag
    121 cagtaccacc accaccacca tcaccacttc ctcctctcga atgcagcagc cacagatctc
    181 tgtctacagt ggttcagacc gacatgctgt acaggtaatt caacaggcat tgcatcggcc
    241 ccccagctca gctgctcagt accttcagca aatgtatgca gcccaacaac agcacttgat
    301 gctgcatact gcagctcttc agcagcagca tttaagcagc tcccagcttc agagccttgc
    361 tgctgttcag gcaagtttgt ccagtggaag accatctaca tctcccacag gaagtgtcac
    421 acagcagtca agtatgtccc aaacgtctat caacctctcc acttctccta cacctgcaca
    481 gttaataagc cgttcccagg cttccagttc taccagcggc agtattaccc aacagactat
    541 gttactaggg agtacttccc ctaccctaac ggcaagccaa gctcaaatgt atctccgagc
    601 tcaaatgctg attttcacac ccgctaccac tgtggctgct gtacagtctg acattcctgt
    661 tgtctcgtcg tcatcgtcat cttcctgtca gtctgcagct actcaggttc agaatttaac
    721 attacgcagc cagaagttgg gtgtattatc tagctcacag aatggtccac caaaaagcac
    781 tagtcaaact cagtcattga caatttgtca taacaaaaca acagtgacca gttctaaaat
    841 cagccaacga gatccttctc cagaaagtaa taagaaagga gagagcccaa gcctggaatc
    901 acgaagcaca gctgtcaccc ggacatcaag tattcaccag ttaatagcac cagcttcata
    961 ttctccaatt cagcctcatt ctctaataaa acatcagcag attcctcttc attcaccacc
  1021 ttccaaagtt tcccatcatc agctgatatt acaacagcag caacagcaaa ttcagccaat
  1081 cacacttcag aattcaactc aagacccacc cccatcccag cactgtatac cactccagaa
  1141 ccatggcctt cctccagctc ccagtaatgc ccagtcacag cattgttcac cgattcagag
  1201 tcatccctct cctttaacag tgtctcctaa tcagtcacag tcagcacagc agtctgtagt
  1261 ggtgtctcct ccaccacctc attcaccaag tcagtctcct actataatta ttcatccaca
  1321 agcacttatt cagccacacc ctcttgtgtc atcagctctc cagccagggc caaatttgca
  1381 gcagtccact gctaatcagg tgcaagctac agcacagttg aatcttccat cccatcttcc
  1441 acttccagct tcccctgttg tacacattgg cccagttcag cagtctgcct tggtatcccc
  1501 aggccagcag attgtctctc catcacacca gcaatattca tccctgcagt cctctccaat
  1561 cccaattgca agtcctccac agatgtcgac atctcctcca gctcagattc caccactgcc
  1621 cttgcagtct atgcagtctt tacaagtgca gcctgaaatt ctgtcccagg gccaggtttt
  1681 ggtgcagaat gctttggtgt cagaagagga acttccagct gcagaagctt tggtccagtt
  1741 gccatttcag actcttcctc ctccacagac tgttgcggta aacctacaag tgcaaccacc
  1801 agcacctgtt gatccaccag tggtttatca ggtagaagat gtgtgtgaag aagaaatgcc
  1861 agaagagtca gatgaatgtg tccggatgga tagaacccca ccaccaccca ctttgtctcc
  1921 agcagctata acagtgggga gaggagaaga tttgacttct gaacatcctt tgttagagca
  1981 agtggaatta cctgctgtgg catcagtcag tgcttcagta attaaatctc catcagatcc
  2041 ctcacatgtt tctgttccac cacctccatt gttacttcca gctgccacca caaggagtaa
  2101 cagtacatct atgcacagta gcattcccag tatagagaac aaacctccac aggctattgt
  2161 taaaccacag atcctaaccc atgttattga aggctttgtg attcaggagg gattggagcc
  2221 atttcctgtg agtcgttcct ctttgctaat agaacagcct gtgaaaaaac ggcctctttt
  2281 ggataatcag gtgataaatt cagtgtgtgt tcagccagag ctacagaata atacaaaaca
  2341 tgcggataat tcatctgaca cagagatgga agacatgatt gctgaagaga cattagaaga
  2401 aatggacagt gagttgctca agtgtgaatt ctgtgggaaa atgggatatg ctaatgaatt
  2461 tttgcggtca aaacgattct gcactatgtc atgtgccaaa aggtacaatg ttagctgttc
  2521 taaaaaattt gcacttagtc gttggaatcg taagcctgat aatcaaagtc ttgggcatcg
  2581 tggccgtcgt ccaagtggcc ctgatggggc agcgagagaa catatcctta ggcagcttcc
  2641 aattacttat ccatctgcag aagaagactt ggcttctcat gaagattctg tgccatctgc
  2701 tatgacaact cgtctgcgca ggcagagcga gcgggaaaga gaacgtgagc ttcgggatgt
  2761 gagaattcgg aaaatgcctg agaacagtga cttgctacca gttgcacaaa cagagccatc
  2821 tatatggaca gttgatgatg tctgggcctt catccattct ttgcctggct gccaggatat
  2881 cgcagatgaa ttcagagcac aggagattga tggacaggcc cttctcttgc tgaaagaaga
  2941 ccatctcatg agtgcaatga atatcaagct aggcccagcc ctgaagatct gtgcacgcat
  3001 caactctctg aaggaatctt aacaggaaca tgaagccttg ataaaacagc agttttactt
  3061 ttctcacaaa aacttgtaag gtaaaggcct aacttggtct agaatatgac acttattgtg
  3121 gtggatagcc aagcacattg ggatctccac atcaaatact gacatttctt ctacaggtat
  3181 aataattcat catgcatttt cataattaat aaacattggt aaaattaatt ttacaggtta
  3241 catgaaacat tgaaagactt gttacagagg gccatgatat ttttcaaaga aatgtgttat
  3301 actagataat ttttttaaag gtgatgttta tcattaatat aaagaatcct tttaaaagta
  3361 atttaatgat ttacatttct cctcttttga ttcaattttc ttatacattt tttctaccct
  3421 attagttttc taaaggttgt catgagaggt atattatgga ataatttagt agtccagtga
  3481 cagaatcgta tgaaatcagt gtacatttta aaaaacatgt cttttagaca tatgctttat
  3541 ctataaaaaa ggaattgtgt tctagtatga acaatactga tctggaagtg agaagagtta
  3601 gtttctattc caaacttgac caagaatttg gtttgactga gaacgttttc ctctcagttt
  3661 ttgtacattt atttagagca gtggttctca gtggaggtca gttttgatcg ccaggggaca
  3721 tctggcaatg ttgagacatt ttggttgtca cagcttgggg gtgggttcag gggagggttg
  3781 ctactggtgt ctagtagtta gaagccagag atgtttctaa acatcttata atgcacagga
  3841 cagcacccct ccactgtaaa gaattattgg ttcaaaaata tcggtactgc caaggttgag
  3901 aaactctgat atagaaggag tgataaatat tgttttcacc caaaggaata cttttaaagg
  3961 atgaagctta ctaaacatat atgatggaag tattattcag ataacattaa tattctgctg
  4021 aataattttt tctagtttaa tcatactaga aaaagaaaaa aaatctacaa attgtcctat
  4081 aaaataagga caaacatgca aataatttaa ctctcagaaa gtactaattc attctgatta
  4141 tctttcatac ctctgtgctc ctctgcactg acgaagacat aatatgatta tacctatgaa
  4201 ctagtgcaca gccttttctg gcaagaaaat agtttgtagc agatacgtgg ttgctctttg
  4261 gatttttttc tattgttgaa catgctggga ctagctagaa tgcacattcc tacttccttt
  4321 accaaacgtt tgcatgcttc ctgcaaagca cttaccaagt gatttctctt gaaccatcgg
  4381 atataatttt gtatgtacat gtttgaggaa aaaaatgtaa agcaaaacct tttactgaac
  4441 agtgttctat agaattatga cactaaaaca aaattgtttg tggaagccct gaaagcttta
  4501 tagtcctgga catcaaaaat tttatttgag atgatgaatg ttttgttttc atcttttctt
  4561 atattaccac aattgagata ttttagtaat tgaaggaaca tacacagata tttggcagaa
  4621 gtcgagtaag gaggggaaaa aaagagtccg tgagtttcag tcattttcac tgctcttttc
  4681 aaaaagattg tgttgagctg gtagaagact aaagatgtca ctgaagacat cacagatact
  4741 atatttatct tttggctttg tgtacattag agaatgttga ttatttttat acaaaaatac
  4801 agcgggtaat ttttttaatc tttagatgcc tcttgtttga atgtatgctt tgtggaattc
  4861 tttgtgtagt aatgttttaa aaaaagatgt ttactgatag ttacatgtag gattagaata
  4921 tgtaatataa tataaggctc atgttccaga cctacgatag cttgtagtct atgttacgta
  4981 tttctttata tcacattttt aatcattgga ttaaagtatc aaggaaagct aggtactcta
  5041 taatgagttt tcatttatta gcagttaatc atcatgacag aattgtcata tgcttgactt
  5101 ttccctcttc ttggaatttc agaacacaaa tacaggctaa gcattagtaa gagatggccc
  5161 acagtatgag agagagaggt gcaacggaaa atctcgcctg gaattaaaac ttttcataga
  5221 ttatccacgg ttaatacaaa atttattata tggggataga ctgctccagc aataatgatt
  5281 acatcctata actgtattac ctatggcctt taaggtatca attttgaact gtgttgtagg
  5341 ctctcctttt atttgttctc tttcctaata gcagccattc tgtacttatt gaaagcccct
  5401 gtgcctactg ctgtcttaag tattcaggag gggcttacaa gagggttttc tattggagaa
  5461 taccgtataa tcttaaatct agtccagatc tctgttgtcc ccactcaaaa catacacaaa
  5521 atatgcactt gcttttttca agtgagtttt tatttaaaaa tggcttgttt gctatcacat
  5581 tggtgcagct gtttctttca agatgagtta atcatcttaa tttcaaagct tcagctatat
  5641 ataatggata tatagacaac actgagcatc cacctctctc ctgagcttta aagcagagtt
  5701 tcagtatgat ataggtgggg agagtaaatt gttttcatat cctttcatac tactactaat
  5761 agttttagga ttttgactgg ggagagataa tgacaaacag aaagggaaca tggaggttct
  5821 tcctactttt gctacctaag tttgcatttt ctgacttcct tgcagtgttg cactctttgt
  5881 cccattggga taaaaagcat aagtttgaaa ttttgcttta agccttgtgt tcctggggaa
  5941 gttaaacaac taagagagct gatttgtaaa aattattttt tatatgacat taatattcat
  6001 caagccttgt gtaggcatgt gtaagacaca gctatgcagc tttgagtagt caatatagta
  6061 tgagatagag tgttgtccca aatcctcctg tcacttttta agtagcatat tatttccctg
  6121 atggtcctgt tactttgctg ttgaatgctc taaacagaac tttttaaaag gtgtgtttta
  6181 agagcagtca cctaggagta gacaaggtgg aatgggagga gagaaatggt aatgcaaaag
  6241 cttgagcatg ggaagagtca gaggaggagg ccatcatcct tgttagctta gcctacttca
  6301 acactgagca catttctgca cttttgaagt gaaattcatg ttttacttag aagaaataat
  6361 tttctttcat tagggatccc agttgatttt tgtttcctgg tgtatcaaaa tacttagaac
  6421 tatgaaacaa gtattattgt gatcatgcct ttgaataatt tttgacgtag cttatcttca
  6481 tgtatcaagt ataaaattat aatgagacat ctattcacaa atacaagtct tagattgaat
  6541 tgaaatgtgt tatagtgccc tgtctcccac tgacttgttc agttaaatgt cttaaagtac
  6601 attatgtaca tcttcaggct tttggtacca caatggcaca agtatggtag ggaggcaata
  6661 tagtcttagg ctatatgcct atattaagtg tgtataaaca atttttgaaa gaatacacta
  6721 ttatagatgt atgtgagtga tgctgacctg acagccatat ccagtggatg aaactgactg
  6781 gacacactgt taaaatgttt taaagatgta ttttcagcca gaacagcctg gttatagttt
  6841 gtggttttca ccttggtgga ttgcaggaac acatgcagcc tactggcatt gagcattagc
  6901 taatggcatg aaagggcctc atctcactac ctctctaagg cctctagctc caagaaaacc
  6961 atgaaaactt ctttcttgga gagatctttg tctcagaatc cttagagagg atttcgtatg
  7021 ggggctaact ttaggaaggg aggcagctgg ggcaggactt tctgatacct gacagtcatg
  7081 ttccagagca acctttgggc agtggaaact ggcgcatcta tgcaaaatga ttgctcaatc
  7141 tctatcttgt gtactacata tgtaactagc tgggccctaa ggaaggtttt ctagggggaa
  7201 ggatagggaa gtagaggagg agacaagtag gaggaacaaa gcattctaga cccaagagga
  7261 tagaagatat ttaggataga tatggctttc atccatagtt caaaataatg cgttttgtta
  7321 gatgccagtt atagcagtaa ataggttata gtttttatat gtcaagattt acctgtaatc
  7381 agactcattc tttcactctc tatacccact gtctccatgc ttgggagcat ggatattaat
  7441 agttccagtg atgtagaagt tagtgatttt tgatttctga aaaaggtgag aaccttttat
  7501 tacagttgga gaatatttgt caaaaattca aaggttgttg taattgagtt gccagaatta
  7561 cagagtttcc attttcagat atcacagttg aatcacctct gtagattgtt ataaagagag
  7621 gcattttaag atagtatttt atttgctagg ttgtgtctca gtctaagaat tgggaaaaga
  7681 agagctatag gtttctcttt cctagtctgg atttcagtaa acacaagcct acctctgctt
  7741 ctttggttca cagcagtgtg gatcatgaaa tgaactgttt acccacattc atcaatattg
  7801 gtattttaca aatctacttg gagcatttaa tttcatctca aagattgtga tccactttag
  7861 ataagcacaa atacagtatt aggaaaagta aatatgcaat cttactaaaa tttcaacttg
  7921 ttaagctgta tatcttaaaa gaaattattt ggggctgggc atggtggctc acacctgtaa
  7981 tcccagcact ttgggaggct gaggtgggta gatcacctga ggtcaggagt tcgagaccag
  8041 cctgaccaat atggtgaaac cctatctcta ctaaaaacac aaaaattagc tgggtgtggt
  8101 ggcatgcacc tgtaattcca gctacttggg aggctgagac aggagaattg cttgaaccca
  8161 ggtggtggag gttgcagtga gccaagatca cacccctgca ctccagcctg ggtgacagag
  8221 cgagactcca tctcaaaaaa acaaaacaaa aaattatttg ggaagatacg tcctctttta
  8281 ttagaagttc ataaaatgta tcatatagtt ttgttcacag tagttatata agctttcttc
  8341 aaataaattt aaaattagat taccttcttt ggaaaaagaa tttcctaaat ttttaagaat
  8401 tttcaaagtt ttacatatta gtttttagaa cctaatccgt tttaaaattg tactatgaga
  8461 aagctttttt ttgaaagttg taaagcatta atacaaataa tacaaatata attattacca
  8521 tcacattcca gagaatatgg ctttttctaa actttcaatt tagaaaacat acattaaggg
  8581 agaatctctg ccctcctttt cagctctgaa gatcagcttt tctactcaga cacatgcaca
  8641 caccccttcc aagtgtcatg tttatgggaa catttgggaa atgttttcca gatgttttat
  8701 tttttccctt ttatagtttg ttgacattta attttactta aagatgacaa ttttaatcgg
  8761 aaatgttaga ggtacaacat agtgaggttc tagctagctt tatacttttg aaaaatattt
  8821 ttgtttctac tgctttttac aagtactagt cctctcagtg atactggtgg tgttcagtat
  8881 gaatccatag aaagaaaaca aaatttgttg tttaaaaaaa gcagagtaat gaatgaattt
  8941 cagttttgaa aacaacataa tttgaaaaca ctgttatact aacatggcaa ggtgttaatt
  9001 aaatataaga gtaaggtagt aagttctttt agagcacctg tttaaattta ctccagtaat
  9061 catcttaagg attgatagtc accatcactt attggcttaa aagttatatt tcatggaata
  9121 ttatcagtgt taaatccaag ctttgtggag ctttaagtga tggtggtgaa aaagttggtg
  9181 tttatgagag agtggtgggg tgtctagtca ttagtgaagt taaacatcaa cctgttttag
  9241 aaagaatttt ttagtcttgc ctaaagtaaa ccagaagtgt ctagtgttta aatctttatt
  9301 tagaatgctt ctcttaaaag tattttttgt tttgggtagt attaaataat cagtaaataa
  9361 tctatttcag tagtaaataa tgaattaaga tgatgatgaa tgaggattaa cacactggtc
  9421 tggagactgg ggttttattt cagtgggtta gctgtgtgtg acatgttggg caattactca
  9481 gctgttttaa cagcttccag atatgcagta tggtgcctgt actactcaaa agttgatttt
  9541 ggtttaattc atctttaagg tacctcccag ctctaaaact atgattctag gctgtgtaat
  9601 ggggttattc ctactttatt ctctttcctt ttttaagggt tcattttata cttaataagc
  9661 atccatttct tgggtcacct acagtctttg ttctcctaag gattaaaata gaaaattcat
  9721 acataacaag caaatgatga cattttccta aatgctcctt attggttaac cactgaatat
  9781 atgaacacat atgaatattg tcattcatgt acttaaattc atttagcaaa ctatttgaac
  9841 acttacatgt gcagtgtttg gtgaacatga catgaggaac tagtagtaag taaaatcttc
  9901 cccccaaaat tcattgtggc ttaaataaat atgaacataa tcattactac ttaatatact
  9961 gagagggaat cttaataaac ttggaactgg gagggaatat ttgtatacat tgggtaaagg
10021 gttaggctag atgacatcta aggggtctga gtgaatcata tcataatttt tataacacat
10081 ttcacatact aaacatcagt tggccccata cctgattaag ttacaaaatt taggagactt
10141 aacattaagg acttacaggt tgagacagcc cgtatttcac aacattattt tgacacttga
10201 ctctattcca gagttgttgc tatacaaggc atgtggcaga acaaaaaaaa agctggtgtt
10261 gatataagag ctttttaccc agtattgaca gtgagcaact ttctttcttt tttttttttt
10321 ttcttttttt tttttttgag atgggttcgc tctgttgccc aggctggtgt gcagtggtgc
10381 gatctcagct cactgcaacc tccacctccc gggttgaagc gattgtcttg cctcagcctt
10441 ccaagtagct ggaattacag gtgcccgccg ccacacctgg ctaatttttg tatttttagt
10441 ccaagtagct ggaattacag gtgcccgccg ccacacctgg ctaatttttg tatttttagt
10501 agagacgggg cttcaccatg ttggccaggc tagtctcgaa ctcttgacct caagtgatcc
10561 acctgccttg gcctccctaa gtgctgggat tacaggcatg agccaccaca cctgtccgac
10621 agtgtagcaa ctttctaaaa ctgaaaaatc tcaaaggaga tcattggaac tgacttgttc
10681 atttattttt tgtttttaaa ttaagaaaga ttacacaaaa taagtgttac tgtactttaa
10741 gctattacaa atatccaact tttaaagata tgtaagaatc agtaatattc tagaaagcac
10801 atatatagta aaagggcatc ctttaaatgt agaacgggta aacatgaaac agttccatgc
10861 ttgaattgtt aagtatctag ggggtaaaca ttgaatggga gaatcattta ttgggttaag
10921 gtcccttcct tgtcattctg ggatctgtga atcacattgt aattcctgtt gacaaagctt
10981 tacttgttaa catcagttga tactgacatt ctccataaag atatagaatg aaaatatcta
11041 ttaaaaatag tttatcattg ttttagcttt tttgttttgt ttgttttgag acagagtctc
11101 actgtcaccc aggcttgagt gcagcggtgt gatcttggct caatgcaacc tccacctccc
11161 aggttcaata gattctccca ccttggcctc ccaagtagct gggattactg gcatgcacca
11221 ctatgcctgg ccagtttttt gtatttttag tagagatggg gtttcaccat gttggccagg
11281 ctggactcga actcctgacc tcaagtgatc cgcccacctc agcctcccaa agtgccggga
11341 ttataggcat gagccactgc gcctagcctg ttgcagcttt ttaaagcagg aaaatatcca
11401 tataaactgt tgggttagaa tctatattag aatctttcaa actaattgaa aacaggaaga
11461 ctatcatcta agtagccaga taatctgggt ttcaaaaagt tattccatgg tactggttta
11521 aaaaatactt ttcaagtgtt ttaattttta aagtgtaact aattcttcaa atatgttatg
11581 ctgttaaaat atgtattcca taagtacttt ttgtatatgt attcttaaat tttaaaaagt
11641 caactgaatg cgcaaagatg atataatttt ggatgtagac atttaaacta gattcccagt
11701 cctctccttc aaaagcttgg tctttgtttt tcctataggg aaaaaagtca aaataagttc
11761 caaaaactat cctcaaagta gtattgtgct tgtagtaaat gaaggttgga tggatggata
11821 ctgacaatgg tggcaggcat ttcaagcctt ttaaattagt actttttgtc gtcttgctta
11881 ttaaaatttt gttaatttta gcaaagacca attgttgtga taaactggtg ttttttggat
11941 gcttcaagca cacgttaacc aattttttaa ttcccctttt ggttcctccc attgttctaa
12001 aataggactt tcatattatt aaaacctcaa aagatgatcc acccaggatg aacaaagatc
12061 accaagggga aagaaaacat tttttatctt tacagaaaac atgttaagat tatatataga
12121 tgtattcttt acattggata ttgtattaga gtcctcctta caagaaatga aatagttttt
12181 agcactctta gcattagagt tcctagattg gtgttgatag ctacagtttt aaaatgtata
12241 acctgaaaat gaaggttaat tttgcattgt aagagcacat ttgatctatg taaaaagtgt
12301 ccatttggtg tattttttta aaaaagagaa agcactttca tattaagtag catgtgtatg
12361 aatttagatt ttcatatttg ttgtgtctgt attcagtgaa gtaaattgag catttaaatg
12421 tttgttgatg gcaacattaa ctattaaatt aaagcacctt atactctgct gcttaacttg
12481 cttgtaattg cacctttgtt acctgcacat tttcatatag aatattgttg taacattgct
12541 tcatgtgggt ctggatggaa gattagtggg cctacaggat catttattta tattgtttat
12601 attacaataa tatattgtag atcagttgta agttcatttc tttacaaata aaagcctctt
12661 ccatttgact ggaaaaaaaa aaaaaaa
BMI1 (accession No. NM_005180):
(SEQ ID NO: 118)
        1 acagcaacta tgaaataatc gtagtatgag aggcagagat cggggcgaga caatggggat
      61 gtgggcgcgg gagccccgtt ccggcttagc agcacctccc agccccgcag aataaaaccg
    121 atcgcgcccc ctccgcgcgc gccctccccc gagtgcggag cgggaggagg cggcggcggc
    181 cgaggaggag gaggaggagg ccccggagga ggaggcgttg gaggtcgagg cggaggcgga
    241 ggaggaggag gccgaggcgc cggaggaggc cgaggcgccg gagcaggagg aggccggccg
    301 gaggcggcat gagacgagcg tggcggccgc ggctgctcgg ggccgcgctg gttgcccatt
    361 gacagcggcg tctgcagctc gcttcaagat ggccgcttgg ctcgcattca ttttctgctg
    421 aacgactttt aactttcatt gtcttttccg cccgcttcga tcgcctcgcg ccggctgctc
    481 tttccgggat tttttatcaa gcagaaatgc atcgaacaac gagaatcaag atcactgagc
    541 taaatcccca cctgatgtgt gtgctttgtg gagggtactt cattgatgcc acaaccataa
    601 tagaatgtct acattccttc tgtaaaacgt gtattgttcg ttacctggag accagcaagt
    661 attgtcctat ttgtgatgtc caagttcaca agaccagacc actactgaat ataaggtcag
    721 ataaaactct ccaagatatt gtatacaaat tagttccagg gcttttcaaa aatgaaatga
    781 agagaagaag ggatttttat gcagctcatc cttctgctga tgctgccaat ggctctaatg
    841 aagatagagg agaggttgca gatgaagata agagaattat aactgatgat gagataataa
    901 gcttatccat tgaattcttt gaccagaaca gattggatcg gaaagtaaac aaagacaaag
    961 agaaatctaa ggaggaggtg aatgataaaa gatacttacg atgcccagca gcaatgactg
  1021 tgatgcactt aagaaagttt ctcagaagta aaatggacat acctaatact ttccagattg
  1081 atgtcatgta tgaggaggaa cctttaaagg attattatac actaatggat attgcctaca
  1141 tttatacctg gagaaggaat ggtccacttc cattgaaata cagagttcga cctacttgta
  1201 aaagaatgaa gatcagtcac cagagagatg gactgacaaa tgctggagaa ctggaaagtg
  1261 actctgggag tgacaaggcc aacagcccag caggaggtat tccctccacc tcttcttgtt
  1321 tgcctagccc cagtactcca gtgcagtctc ctcatccaca gtttcctcac atttccagta
  1381 ctatgaatgg aaccagcaac agccccagcg gtaaccacca atcttctttt gccaatagac
  1441 ctcgaaaatc atcagtaaat gggtcatcag caacttcttc tggttgatac ctgagactgt
  1501 taaggaaaaa aattttaaac ccctgattta tatagatatc ttcatgccat tacagctttc
  1561 tagatgctaa tacatgtgac tatcgtccaa tttgctttct tttgtagtga cattaaattt
  1621 ggctataaaa gatggactac atgtgatact cctatggacg ttaattgaaa agaaagattg
  1681 ttgttataaa gaattggttt cttggaaagc aggcaagact ttttctctgt gttaggaaag
  1741 atgggaaatg gtttctgtaa ccattgtttg gatttggaag tactctgcag tggacataag
  1801 cattgggcca tagtttgtta atctcaacta acgcctacat tacattctcc ttgatcgttc
  1861 ttgttattac gctgttttgt gaacctgtag aaaacaagtg ctttttatct tgaaattcaa
  1921 ccaacggaaa gaatatgcat agaataatgc attctatgta gccatgtcac tgtgaataac
  1981 gatttcttgc atatttagcc attttgattc ctgtttgatt tatacttctc tgttgctacg
  2041 caaaaccgat caaagaaaag tgaacttcag ttttacaatc tgtatgccta aaagcgggta
  2101 ctaccgttta ttttactgac ttgtttaaat gattcgcttt tgtaagaatc agatggcatt
  2161 atgcttgttg tacaatgcca tattggtata tgacataaca ggaaacagta ttgtatgata
  2221 tatttataaa tgctataaag aaatattgtg tttcatgcat tcagaaatga ttgttaaaat
  2281 tctcccaact ggttcgacct ttgcagatac ccataaccta tgttgagcct tgcttaccag
  2341 caaagaatat ttttaatgtg gatatctaat tctaaagtct gttccattag aagcaattgg
  2401 cacatctttc tatactttat atacttttct ccagtaatac atgtttactt taaagattgt
  2461 tgcagtgaag aaaaaccttt aactgagaaa tatggaaacc gtcttaattt tccattggct
  2521 atgatggaat taatattgta ttttaaaaat gcatattgat cactataatt ctaaaacaat
  2581 tttttaaata aaccagcagg ttgctaaaag aaggcatttt atctaaagtt attttaatag
  2641 gtggtatagc agtaatttta aatttaagag ttgcttttac agttaacaat ggaatatgcc
  2701 ttctctgcta tgtctgaaaa tagaagctat ttattatgag cttctacagg tatttttaaa
  2761 tagagcaagc atgttgaatt taaaatatga ataaccccac ccaacaattt tcagtttatt
  2821 ttttgctttg gtcgaacttg gtgtgtgttc atcacccatc agttatttgt gagggtgttt
  2881 attctatatg aatattgttt catgtttgta tgggaaaatt gtagctaaac atttcattgt
  2941 ccccagtctg caaaagaagc acaattctat tgctttgtct tgcttatagt cattaaatca
  3001 ttacttttac atatattgct gttacttctg ctttctttaa aaatatagta aaggatgttt
  3061 tatgaagtca caagatacat atatttttat tttgacctaa atttgtacag tcccattgta
  3121 agtgttgttt ctaattatag atgtaaaatg aaatttcatt tgtaattgga aaaaatccaa
  3181 taaaaaggat attcatttag aaaatagcta agatctttaa taaaaatttg atatgaaaag
  3241 cacaatgtgc agaagttatg gaaaacctat agaggattac aacaggtaaa cgttaaagag
  3301 aatacattgc tgacttatag tgatgtggct aagaagtaca tgctttgttg taaaattgct
  3361 tgaaagccca ttgaaagatg tatctgttta tttacagtct ttgaagtaaa agttaccaat
  3421 gtttgccaat aaaaa
PCGF2 (accession No. NM_007144):
(SEQ ID NO: 119)
        1 tctcccctcc cgccgcccgg gcgagcgaca cggctgcggc ccccctcccc tcccttccct
      61 ccctccctcc catccccccc tccccgagac ccaccggacc ccgaacccag atggccgaaa
    121 cgggctcccc gtcttaacga tttggcgtct ccctcgacca ccacctcttt gtgcagcagc
    181 ccccgggcag accctgttcc gagggcaacg ctccccagtc cccccacccc cgaccccgga
    241 atcatgcatc ggactacacg gatcaaaatc acagagctga acccccacct catgtgtgcc
    301 ctctgcgggg ggtacttcat cgacgccacc actatcgtgg agtgcctgca ttccttctgc
    361 aaaacctgca tcgtgcgcta cctggagacc aacaaatact gccccatgtg tgacgtgcag
    421 gtccataaaa cccggccgct gctgagcatc aggtctgaca aaacacttca agacattgtc
    481 tacaaattgg tccctgggct ttttaaagat gagatgaaac ggcggcggga tttctatgca
    541 gcgtaccccc tgacggaggt ccccaacggc tccaatgagg accgcggcga ggtcttggag
    601 caggagaagg gggctctgag tgatgatgag attgtcagcc tctccatcga attctacgaa
    661 ggtgccaggg accgggacga gaagaagggc cccctggaga atggggatgg ggacaaagag
    721 aaaacagggg tgcgcttcct gcgatgccca gcagccatga ccgtcatgca tcttgccaag
    781 tttctccgca acaagatgga tgtgcccagc aagtacaagg tggaggttct gtacgaggac
    841 gagccactga aggaatacta caccctcatg gacatcgcct acatctaccc ctggcggcgg
    901 aacgggcctc tccccctcaa gtaccgtgtc cagccagcct gcaagcggct caccctagcc
    961 acggtgccca ccccctccga gggcaccaac accagcgggg cgtccgagtg tgagtcagtc
  1021 agcgacaagg ctcccagccc tgccaccctg ccagccacct cctcctccct gcccagccca
  1081 gccaccccat cccatggctc tcccagttcc catgggcctc cagccaccca ccctacctcc
  1141 cccactcccc cttcgacagc cagtggggcc accacagctg ccaacggggg tagcttgaac
  1201 tgcctgcaga caccatcctc caccagcagg gggcgcaaga tgactgtcaa cggcgctccc
  1261 gtgcccccct taacttgagg ccagggaccc tctcccttct tccagccaag cctctccact
  1321 ccttccactt tttctgggcc cttttttcca cctcttctac tttccccagc tcttcccacc
  1381 ttgggggtgg ggggcgggtt ttataaataa atatatatat atatgtacat aggaaaaacc
  1441 aaatatacat acttattttc tatggaccaa ccagattaat ttaaatgcca caggaaacaa
  1501 actttatgtg tgtgtgtatg tgtggaaaat ggtgttcatt ttttttgggg ggggtcttgt
  1561 gtaatttgct gtttttgggg gtgcctggag atgaactgga tgggccactg gagtctcaat
  1621 aaagctctgc accatcctcg ctgtttccca aggcaggtgg tgtgttgggg gccccttcag
  1681 acccaaagct ttaggcatga ttccaactgg ctgcatatag gagtcagtta gaatcgtttc
  1741 tttctctccc cgtttctctc cccatcttgg ctgctgtcct gcctctgacc agtggccgcc
  1801 ccccacgttg ttgaatgtcc agaaattgct aagaacagtg ccttttacaa atgcagttta
  1861 tccctggttc tgaggagcaa gtgcagggtg gaggtggcac ctgcatcacc tcctcctctt
  1921 gcagtggaaa ctttgtgcaa agaatagata gttctgcctc tttttttttt tttcctgtgt
  1981 gtgtggcctt tgcatcattt atcttgtgga aaagaagatt caggccctga gaggtctcag
  2041 ctcttggagg agggctaagg ctttagcatt gtgaagcgct gcacccccac caaccttacc
  2101 ctcaccgggg aaccctcact agcaggactg gtggtggagt ctcacctggg gcctagagtg
  2161 gaagtggggg tgggttaacc tcacacaagc acagatccca gactttgcca gaggcaaaca
  2221 gccttccaat tgcccctcca cccccagctg aggcccggtc acctggtcag gacagagcaa
  2281 ctgcatctaa aagcacaaga agacagaaac ctgtaagctc tgaccccacc cccacccctt
  2341 gagaggtcag cggaccacct ccttagggac agaccctggc aggtcgctgc ccaccgagat
  2401 ttcctcaagt gtgcatagat ctgagaggag tcgggagtcg agactcgaga ttccatcata
  2461 gcgtaggtgt gtggggttgg gagccccctg atgggcttgt ctgtgtttgc accttgtcct
  2521 gtgtctgagg tcctgtgact gtaccctcct ttgccctggg acatctgtat ctcttggctt
  2581 tgtaataaat gctgcatact ttctaaaaaa aaaaaaaaaa aa
ZNF134 (accession No. NM_003435):
(SEQ ID NO: 120)
        1 cgaactgtga tggcggcggc cgcggtgatg ggcccggcgc agatcctctg tggttgttga
      61 attgtaacaa gagagagaac tctggctgcc tgagagggca tgactctagt cacagcagga
    121 ggggcttgga caggccctgg ttgttggcat gaagtgaagg atgaagagtc atcttctgaa
    181 cagagcattt ctatagcagt gtcacatgtt aatacttcca aggcaggttt gcccgcacag
    241 acggctctcc cttgtgacat atgtggcccc atcttgaaag atattttgca cctggatgaa
    301 caccagggta cacaccatgg actgaaactt cacacatgtg gggcatgtgg gagacaattc
    361 tggttcagtg caaaccttca tcagtaccag aagtgttaca gtatagagca acccttaaga
    421 agggataaaa gtgaggcctc aattgtgaag aactgcacag ttagcaaaga acctcatccg
    481 tcagagaagc cctttacgtg taaggaggag cagaaaaact tccaggctac tttgggtggc
    541 tgccaacaaa aggccatcca cagtaagagg aagacacaca ggagcactga gagtggggat
    601 gcatttcatg gtgaacaaat gcattacaag tgcagtgaat gtgggaaagc tttcagccgc
    661 aaagacacac ttgtccagca ccagagaatt catagtggag agaagcctta tgagtgcagc
    721 gaatgtggga aagccttcag ccgcaaagct acacttgtcc agcatcagag aatccatact
    781 ggagaaaggc cttatgaatg cagcgaatgt ggaaaaacct tcagtcgaaa agacaacctt
    841 actcagcaca agagaatcca cactggagaa atgccttata agtgcaatga atgtgggaaa
    901 tattttagcc atcactccaa tctaattgta caccagagag ttcacaatgg agcaaggcct
    961 tataagtgca gtgattgtgg gaaagtcttc agacacaaat ctacacttgt tcagcatgag
  1021 agtattcaca ctggagaaaa tccttatgat tgcagtgatt gtgggaaatc ctttggccac
  1081 aaatacaccc tcattaaaca tcagcgaatt cacactgagt caaagccgtt tgagtgcatt
  1141 gaatgcggga aattctttag tcgaagttct gactatattg cacaccagag ggttcacact
  1201 ggtgaaaggc cttttgtgtg cagtaaatgt gggaaagact ttatcagaac ctcccacctt
  1261 gttcgacacc aaagagttca cactggagaa aggccatatg agtgcagtga atgtgggaag
  1321 gcctacagct taagctccca cctcaatcgg caccagaaag ttcacactgc aggcaggctt
  1381 taggagtgct ttgaatacaa caggactcat caatcagatg ttgaatttca tgtatctgaa
  1441 cattgacaca aaggagatac cttatggtgc caggtacgtg ggaaccttct agggatatgt
  1501 tgcactttct gacttgctca ggttttttgc cagagttatg tcactgtcaa tccatgtggc
  1561 cgaaaccatc ttaactctac cagctaagat accccagcat tggggaaggc agggttttgt
  1621 attgtccagt ccctggagaa aatcatgaaa tgcctgagtt cattgggggt cctcattccc
  1681 ttctgtatga caggtatagg tatggatatg acccattttt agccaagagg gtctgagctg
  1741 tatctgctgg tggcttatac aaaaagttta ctttcttcat ggatattctt ggtctcacat
  1801 acttgtaatc aagtttttcc agcctccaag tcacctggcc tgggaaagta cttgcctcat
  1861 gttgctctgg tttgtgataa taaaggcttt acagtttaag ccacatttaa tcttggggct
  1921 tcttcttatg gtctggggtg gattgaaaac aggctctgcc aaactgaaga cagcctttgt
  1981 gcggtgcctc caactttgcc tcaaatggga cagtgggttg agggagaaca gttcttagtc
  2041 cagttttgat gttaacttcc atagctgaca aagcttgtta agtaagaatt aagatcttgt
  2101 gtagacctga tttgtctgga ttttagagtt atttgagagc ccatatttca ccttgaggag
  2161 ggtgctgctg ctgtgacagc ctgcagtgtt ttgaaacagc atggattggg tgtcttgttt
  2221 gcagcatgtg tcccatgttc cccaacac
RING1 (accession No. NM_002931):
(SEQ ID NO: 121)
        1 cagcgcccgg gccatggcgg cggcggtggc gggagctgct gtctgagcag cggttgcgga
      61 ccgagcgaac ttggcccagg agcccgggcc tagggagagg cgcggcggcg gcgggagcgc
    121 gaacggctgg agctggcctt cttcgccttc tcctcggctg tggagccctg gtggggggtc
    181 tgcgcccggt caccatgacg acgccggcga atgcccagaa tgccagcaaa acgtgggaac
    241 tgagtctgta tgagctgcac cggaccccgc aggaagccat aatggatggc acagagattg
    301 ctgtttcccc tcggtcactg cattcagaac tcatgtgccc tatctgcctg gacatgctga
    361 agaatacgat gaccaccaag gagtgcctcc acagattctg ctctgactgc attgtcacag
    421 ccctacggag cgggaacaag gagtgtccta cctgccgaaa gaagctggtg tccaagcgat
    481 ccctacggcc agaccccaac tttgatgccc tgatctctaa gatctatcct agccgggagg
    541 aatacgaggc ccatcaagac cgagtgctta tccgcctgag ccgcctgcac aaccagcagg
    601 cattgagctc cagcattgag gaggggctac gcatgcaggc catgcacagg gcccagcgtg
    661 tgaggcggcc gataccaggg tcagatcaga ccacaacgat gagtgggggg gaaggagagc
    721 ccggggaggg agaaggggat ggagaagatg tgagctcaga ctccgcccct gactctgccc
    781 caggccctgc tcccaagcga ccccgtggag ggggcgcagg ggggagcagt gtagggacag
    841 ggggaggcgg cactggtggg gtgggtgggg gtgccggttc ggaagactct ggtgaccggg
    901 gagggactct gggaggggga acgctgggcc ccccaagccc tcctggggcc cccagccccc
    961 cagagccagg tggagaaatt gagctcgtgt tccggcccca ccccctgctc gtggagaagg
  1021 gagaatactg ccagacgagg tatgtgaaga caactgggaa tgccacagtg gaccacctct
  1081 ccaagtactt ggccctgcgc attgccctcg agcggaggca acagcaggaa gcaggggagc
  1141 caggagggcc tggagggggc gcctctgaca ccggaggacc tgatgggtgt ggcggggagg
  1201 gtgggggtgc cggaggaggt gacggtcctg aggagcctgc tttgcccagc ctggagggcg
  1261 tcagtgaaaa gcagtacacc atctacatcg cacctggagg cggggcgttc acgacgttga
  1321 atggctcgct gaccctggag ctggtgaatg agaaattctg gaaggtgtcc cggccactgg
  1381 agctgtgcta tgctcccacc aaggatccaa agtgacccca ccaggggaca gccagaggaa
  1441 ggggaccatg gggtatccct gtgtcctggt ctatcacccc agcttctttg tcccccagta
  1501 cccccagccc agccagccaa taagaggaca caaatgagga cacgtggctt ttatacaaag
  1561 tatctatatg agattcttct atattgtaca gagtggggca aaacacgccc ccatctgctg
  1621 ccttttctat tgccctgcaa cgtcccatct atacgaggtg ttggagaagg tgaagaaccc
  1681 tcccattcac gcccgcctac caacaacaaa cgtgcttttt tcctctttga aacctgcaaa
  1741 aaaa
RNF2 (accession No. NM_007212):
(SEQ ID NO: 122)
        1 gcgcctccgc ccctcgctcg ctcgctcctt cccgccctcc ccgcagcgcc ggccgagccg
      61 gcttcccctc agtctctcat gaatattgag cggcccctgt tgtatttccc gagctccatt
    121 gcggaagctg aggctcgcca tattgtgcgg cggcgccggc gtccgcggca gctgatacca
    181 gagtcttgct ccggccgcgg ccagcggagc cctgggctgg ggcaggagcc gcaatgtctc
    241 aggctgtgca gacaaacgga actcaaccat taagcaaaac atgggaactc agtttatatg
    301 agttacaacg aacacctcag gaggcaataa cagatggctt agaaattgtg gtttcacctc
    361 gaagtctaca cagtgaatta atgtgcccaa tttgtttgga tatgttgaag aacaccatga
    421 ctacaaagga gtgtttacat cgtttttgtg cagactgcat catcacagcc cttagaagtg
    481 gcaacaaaga atgtcctacc tgtcggaaaa aactagtttc caaaagatca ctaaggccag
    541 acccaaactt tgatgcactc atcagcaaaa tttatccaag tcgtgatgag tatgaagctc
    601 atcaagagag agtattagcc aggatcaaca agcacaataa tcagcaagca ctcagtcaca
    661 gcattgagga aggactgaag atacaggcca tgaacagact gcagcgaggc aagaaacaac
    721 agattgaaaa tggtagtgga gcagaagata atggtgacag ttcacactgc agtaatgcat
    781 ccacacatag caatcaggaa gcaggcccta gtaacaaacg gaccaaaaca tctgatgatt
    841 ctgggctaga gcttgataat aacaatgcag caatggcaat tgatccagta atggatggtg
    901 ctagtgaaat tgaattagta ttcaggcctc atcccacact tatggaaaaa gatgacagtg
    961 cacagacgag atacataaag acttctggta acgccactgt tgatcactta tccaagtatc
  1021 tggctgtgag gttagcttta gaagaacttc gaagcaaagg tgaatcaaac cagatgaacc
  1081 ttgatacagc cagtgagaag cagtatacca tttatatagc aacagccagt ggccagttca
  1141 ctgtattaaa tggctctttt tctttggaat tggtcagtga gaaatactgg aaagtgaaca
  1201 aacccatgga actttattac gcacctacaa aggagcacaa atgagccttt aaaaaccaat
  1261 tctgagactg aactttttta tagcctattt ctttaatatt aaagatgtac tggcattact
  1321 tttatggaca gatcttggat atgttgttca attttctttc tgagccagac tagtttacgc
  1381 tattcaaatc ttttcccctt tatttaagat ttcctttttg gaagggactg caattattca
  1441 gtattttttt ctttccttta aaaaaatata tctgaagttt cttgtgtttt tttttttccc
  1501 cacaaagtgt gtttccactt ggagcaccat tttgacccag gaatttttca tagtttctgt
  1561 attcttataa gattcagttg gctgtccttt tcctgctccc ctcaaaagat ttttagtcat
  1621 acagaatgtt aaatattatg tattctgact ttttttttcc cccggagtct tgtatattta
  1681 tagttttcta tataaactgt agtatcttca tgaagaccca aggctcaaat ttactgtcct
  1741 taaaaacaat tctcatagga ttattctttt catggtattt tcttccataa tatctcattt
  1801 taaaaagaag ttctttatga acttagtgtc cattgtcatg caatgttttt ttttttccat
  1861 tctttttccc tgtaattttg gaatttctgg tcctgggaag aatcaaacaa aatcttaagt
  1921 tctatgagaa cttggttcat tgacatattc tgctgaagaa agaaaaatta aattggtagt
  1981 aaaatatagt cttcaagtat acgtttgaga gtgctttttt ttgtattagt tctgctgtca
  2041 cttcatttcc tgtattatat gtgatgtttt tccccattaa aataccagag ataatggaga
  2101 tattttgcac tttagccttg atgaaaagta caagatatgt tcaaagcttc cctaattttt
  2161 ttcttatttg tagccacata agtttcaaga ataacatggc acacagaaca atggaaaaaa
  2221 gtttgtttcc attggaaaat tatatcattt tgggttgcca catcagttta taaatttggc
  2281 gctcttttaa ttacactctg tagaaggtta atagagcttg agccctgctt taatatgtag
  2341 tgaaagataa ttctgtagaa aaacgtcagc cagtagggta aagtcattct actgttctta
  2401 atttttatat tgaggaacaa tattgggtgt ttgggagcca gaaagctttg ttgacagatc
  2461 agaaataaga ttgacttggg tgttatattt catctctctc cagactctag gtatatttcc
  2521 aactttatat atcacagtat ttaaaaagac atgtttgcat tgagaaatta accctaaagg
  2581 gttttcaata gggtgtagac ctccagtacc tttgtaacta aagtctgtct agtcattgta
  2641 aatatttatc tgtcagtttt gacagattgg ggccagcttg atgttttaaa tcttcagccc
  2701 ggtatgaaaa cttaaaggta tatattcaat tttttaccat tttatggaaa atatttaaaa
  2761 tctgttttta cagggttttt tttttttttt tttttttgta atctgtgcca tgaaatttga
  2821 aaaccaccaa aaatcaaggg aacttttata tattcaattc cttttctggt gtaatgttaa
  2881 agttgtatag attattaatg catgcccact gaatataacc ctggttttgt gataaaactg
  2941 cttagatttt gttgatgaca ttagattagt agttgcatta aataactaaa ttcccattgt
  3001 gattaattga aattttgtct ttaagcagag agttatttgt gactataagc tttgtgctta
  3061 gagaatgtat gtgtttttat ctgtcagtat gggaggatat aaactgcatc attagtgaaa
  3121 ttattggttg tgtaatcctt tgtgaaatat aattctaggt atttgatagg gtattgagtg
  3181 tattttgtgt gtgtgtggat gtgtgttttg gggtacgggg agaggcgatg ctattggcca
  3241 tcactaccaa ccagggtttc aaaaagtatt acctaagtaa tttcttttat cactatctca
  3301 actgaggaag aaaaggctca ccacaagtgg tgtgaaggct ttgggtactt agttctaaat
  3361 ttttttatgg taacatatac atagccacat ttacagtttt aaccatttta aggcatgtaa
  3421 ttcagtgggg ttaggtacat tcacaatgtt gtgtaatgat caccgctgtc tacttgtaaa
  3481 actttttcat caccccaaac agaaactctg tgtgcaatta aagtaatgca tttctcttct
  3541 tcttaacccc t
PHF1 (accession No. NM_024165):
(SEQ ID NO: 123)
        1 ctccctcccc cccgccgcct cctcctcctg ccgctgccgc tgctttggct gctgcgtcat
      61 acgccccaga gccgccggga cggaggggct gggcctgggg accccccggc ctccgcctgc
    121 acgccccccc acgcccggac gtgccctctc cgcgcggggg actcgcctag gtctcctacg
    181 tctgcccctg cccggctccc ggcggcccca gctgtcaccg gcccccccag gatgcaatgg
    241 cgcagccccc ccggctgagc cgctctggtg cctcctcact ttgggaccca gcttctcctg
    301 ctcccacctc tggccccagg cctcggcttt gggagggtca agatgtgctg gccagatgga
    361 ctgatgggct gctatacttg ggtaccatca aaaaggtgga cagtgctagg gaggtgtgtc
    421 tggtccagtt tgaggatgat tcgcagtttc tggttctatg gaaagacatt agccctgctg
    481 ccctccctgg agaggaactc ctctgttgtg tctgtcgctc tgagactgtg gtccctggga
    541 accggctggt cagctgtgag aagtgtcgcc atgcttatca ccaggactgc catgttccca
    601 gggctccagc ccctggagag ggagagggca catcctgggt atgccgccag tgtgtctttg
    661 cgatcgccac caagagggga ggtgccctga agaagggccc ctatgcccgg gccatgctgg
    721 gtatgaagct ttctctgcca tatggactga aggggctgga ctgggatgct ggacatctga
    781 gcaaccgaca gcagagttac tgttactgtg gtggccctgg ggagtggaac ctgaaaatgc
    841 tgcagtgccg gagctgcctg cagtggttcc atgaggcctg cacccagtgt ctgagcaagc
    901 ccctcctcta tggggacagg ttctatgaat ttgaatgctg tgtgtgtcgc gggggccctg
    961 agaaagtccg gagactacag cttcgctggg tggatgtggc ccatcttgtc ctgtatcacc
  1021 tcagtgtttg ctgtaagaag aaatactttg attttgatcg tgagatcctc cccttcactt
  1081 ctgagaattg ggacagtttg ctcctggggg agctttcaga cacccccaaa ggagaacgtt
  1141 cttccaagct cctctctgct cttaacagcc acaaggaccg tttcatttca gggagagaga
  1201 ttaagaagag gaaatgtttg tttggtctcc atgctcggat gcctccccct gtggagcccc
  1261 ctactggaga tggagcactc accagcttcc cttcagggca gggccctggg ggaggggtct
  1321 cacgtcccct ggggaagcgc cggaggccgg agccagagcc cctgaggagg aggcagaagg
  1381 ggaaagtgga ggagctgggg ccaccctcag cagtgcgcaa tcagcccgag ccccaggagc
  1441 agagggagcg ggctcatctg cagagggcac tgcaggcctc agtgtctcca ccatccccca
  1501 gccctaacca gagttaccag ggcagcagcg gctacaactt ccggcccaca gatgcccgct
  1561 gcctgcccag cagccccatc cggatgtttg cttccttcca cccttctgcc agcaccgcag
  1621 ggacctctgg ggacagtgga cccccagaca ggtcacccct ggaacttcac attggtttcc
  1681 ccacagacat ccctaaaagt gccccccact cgatgactgc ctcatcttcc tcagtttcat
  1741 ccccatcccc aggtcttcct agacgctcag cacccccttc tcccctgtgc cgtagtttgt
  1801 ctcctgggac tgggggagga gtccgaggtg gggttggtta cctgtcccga ggggaccctg
  1861 tccgggtcct tgctcggaga gtacggcctg atggctctgt gcagtacctg gttgagtggg
  1921 gaggaggggg catcttctga acagcctgcc tctgcccagc tccccattca cacacaccgg
  1981 cactttcata ccctgacctc tgacctcacc tacagctggg atgtacctgg agagataggg
  2041 ggtagttctc cctactgccc aggctggaat ccaagagtgg ggagtgggga agaggccctc
  2101 ttctctaccc tccttcatga ttcctgaccc ctcccatcct tcccatttcc tttgatgtta
  2161 ttttgttaca gctttttaaa tattttttaa aattatttaa cccctggggg cagagactga
  2221 ggagggagga tgataaggga tcccggactc tgtatgattg aaataaagag aaataaacaa
  2281 atctagcagc tctgaaaaaa aaaaaaaaaa aa
MTF2 (accession No. NM_007358):
(SEQ ID NO: 124)
        1 gctgccattc ggcaccggag tcgctccgcg ctcccagaat gcaccggcag tccgcgggaa
      61 accaaaatgg cgaggggctg tattgaagtg ggctgtgttt gaggccggtg taagaacgct
    121 cattctaccc ccaacccttg tctccaagga cctcggtttg tgcgtgcata tgtgccgggt
    181 acccggtggg gcgggtgccc agtaagtgct cggactcgca ggggaagcgc ccacggggac
    241 ggattggttg ttttttcctg tatgaagcgg ttggcaccac tgaagtgacc gaatgagaga
    301 ctctacaggg gcaggtaatt cactggtcca caagcggtct cctttacgtc gaaaccaaaa
    361 gaccccaaca tccttgacca agctgtcttt acaggatgga cataaagcca aaaagccagc
    421 atgtaaattt gaagagggtc aggatgtcct agctagatgg tcagatggct tgttttatct
    481 tggcactatc aaaaagataa acatattgaa acagagctgc ttcatcatat ttgaagacag
    541 ttctaaatcc tgggttctct ggaaggacat tcaaacagga gccactggaa gtggggaaat
    601 ggtctgtaca atatgtcaag aagagtattc agaagctccc aatgaaatgg ttatatgtga
    661 caagtgtggc caaggatatc atcagttgtg tcacacacct catattgatt ccagtgtgat
    721 tgattcagat gaaaaatggc tctgtcggca gtgtgttttt gcaacaacaa caaagagggg
    781 tggtgcactt aagaaaggac caaatgccaa agcattgcaa gtcatgaagc agacattacc
    841 ctatagtgtg gcagaccttg aatgggatgc aggtcataaa accaatgtcc agcagtgtta
    901 ctgctattgt ggaggccctg gagactggta tttgaagatg ctacagtgct gcaaatgtaa
    961 gcagtggttt catgaggctt gtgtgcaatg ccttcaaaag ccaatgctat ttggagacag
  1021 attttatacg tttatatgct ctgtctgcag ttctggacca gaatacctca aacgtctacc
  1081 attacagtgg gtagatatag cacacctatg cctttacaac ctaagtgtta ttcataagaa
  1141 gaaatacttt gattctgaac ttgagcttat gacatacatt aatgaaaact gggatagatt
  1201 gcaccctgga gagctggcag acacaccaaa atctgaaaga tatgagcatg ttctggaggc
  1261 attaaatgat tacaagacca tgtttatgtc tgggaaagaa ataaagaaga agaagcattt
  1321 gtttgggttg cgaattcgtg ttcctcctgt gccaccaaat gtggctttca aagcagagaa
  1381 agaacctgaa ggaacatctc atgaatttaa aattaaaggc agaaaggcat ccaaacctat
  1441 atctgattca agggaagtaa gcaatggcat agaaaaaaaa ggaaagaaaa aatctgtagg
  1501 tcgtccacct ggcccatata caagaaaaat gattcaaaaa actgctgagc cacttttgga
  1561 taaggaatca atttcagaga atcctacttt ggatttacct tgttctatag ggagaactga
  1621 gggaactgca cattcatcca atacctcaga tgtggatttc acgggtgctt ccagtgcaaa
  1681 agaaactacc tcgtctagca tttccaggca ttatggatta tctgactcca gaaaaagaac
  1741 gcgtacagga agatcttggc ctgctgcaat accacatttg cggagaagaa gaggtcgtct
  1801 tccaagaaga gcactccaga ctcagaactc agaaattgta aaagatgatg aaggcaaaga
  1861 agattatcag tttgatgaac tcaacacaga gattctgaat aacttagcag atcaggagtt
  1921 acaactcaat catctaaaga actccattac cagttatttt ggtgctgcag gtagaatagc
  1981 atgtggcgaa aaataccgag ttttggcacg tcgggtgaca cttgatggaa aggtgcagta
  2041 tcttgtggaa tgggaaggag caactgcatc ctgactgtag gactgaacat tatgttcact
  2101 gcactctgat tttctgtagg tacagttcaa agccctaaag gagtctggct tttactatct
  2161 ttcttaaaaa aaaaaaaaag tcaaaaaaat tcaaaaaagg ggatgatact agccttaaca
  2221 tgtacctgtc aatgttatgg atattgtcat aaaaaggtat cttttaaaaa tcagaacaga
  2281 gacttaattt tttaaatctt aagatttgta gaatgtttct aggataggat attaaaaatg
  2341 attgaaaccc atgcatggtg ttagacaatt tttctaatta ttccattgag tcagtttttt
  2401 gtgattagtg attatcagag caaacatcat gtagatagca caagtatttg gagaaacgtt
  2461 gtttgttttg ttaccaaaat gttggaaaaa tttatttcaa taccttttag atttcataaa
  2521 gtgcagtgta tataatgcct actgaaagac tgtaaaatat tgaaattttc tttcaagcaa
  2581 agtgtaaaaa aatatattga gcctgtaaat tgctctgtga ctagacttca ttgtcgtctt
  2641 aatatattct tgcatgtgca tatatataca cacgtgtata tatatgtgtg tgattatgtg
  2701 acctatgcaa tacaaattat gggaatgggc agctttggag tatatatccc ataattcttt
  2761 tttcaggaat agttgcagta tttacacagc agcatttctt ctcaggcttt tattgggtgc
  2821 tgttgcttgc tatgtatgaa gagaaatgtg tcagacaagt ttagtgtgtt ctgaagaagg
  2881 gtgtgaacaa cagtgttcat gggcttttag aatgcttttc acttttagtc cttgtaactc
  2941 agctgttcag tacctaaaac aaattcaaat aatatgaaca ttatctccta ctagaagtaa
  3001 cgttttcaag ttttcatggc acattatgat tgtaaatgtc tctcattttt aacagtaagt
  3061 ctataggagt cccgtgaaga ttcctgaaat gtctgtagta actgttagtc atgtttgaat
  3121 aagtgtagta tgaacaaagt attttattgc acagggttaa caaacagtat gttgccagct
  3181 gaggctactg ctgttttatt acaacattac ctcttgtttt tataaagtgt accaagattt
  3241 aaattgataa ctttatttta cttgtaaaaa aaaagtttct tttatcacca gtgttacagt
  3301 tgtcttctgt ttctttttgt tttgttttat ttgttttcct ttttagccaa agagtgaaca
  3361 gaagattttc ttattttggt ggctattcat tttactttta aaagtgattg gtggatttta
  3421 gactaattat gggggaattt gccaccaaaa taaaaaatat gtaaagtgta gtgattacag
  3481 agtggttaaa atgtgggtta gtacttattt attccattaa ttgattattt gactgtttat
  3541 aaagaaagtt gctttatttc tttaaacatc ttcaaaagat gatcctttct tgtcacatta
  3601 tagccaaaag aagcagagaa cttcattgtc tgcatttggt tcctggttgg ccaggtataa
  3661 atgagcttta caaaagtgca aattaaaaac tgttacttct gtttacctcc accaaaactt
  3721 gattttcccc tagctattaa tttaaggttg cctttcctgc agctgcaata ttttgaataa
  3781 cacacagagt ttgtgttgat ttttgaatgt ttgtttatat ctaggggtaa tgaaaaatgt
  3841 aaatcccgtg tatccttatt cactccacct gtatcatatt atttcatttt ccccaaagtc
  3901 ctttaattct aactgaacac cagcagtatt tttagaaatt tttctttaac atacttggaa
  3961 gatgatttat ccagctgaac tgtctttaga cgtaattatt gtgaatgtct gttttatttt
  4021 ctcatggtgg ttcacatggc tctgatgttc agtttgtatt tttggaattg ctttacttag
  4081 aaattaaaac agaccaacat taaatgtgtg tattttttaa agagctaaaa aaaaaaaaaa
  4141 aaaa
PHF19 (accession No. NM_001286840):
(SEQ ID NO: 125)
        1 accagtaagt cgtgtattta gcattcattc atcaaagcct ccggatgcct cctacgtgcc
      61 ctgcactatg ctggtcttgg taatccgtgg tccctatccc agcgcccagt gtcaggggaa
    121 gctgatggag aatcgagctc tggatccagg gactcgggac tcctatggtg ccaccagcca
    181 cctccccaac aagggggccc tggcgaaggt caagaacaac ttcaaagact tgatgtccaa
    241 actgacggag ggccagtatg tgctgtgccg gtggacagat ggcctgtact acctcgggaa
    301 gatcaagagg gtcagcagct ctaagcaaag ctgcctcgtg actttcgaag ataattccaa
    361 atactgggtc ctatggaagg acatacagca tgccggtgtt ccaggagagg agcccaagtg
    421 caacatctgc ctagggaaga catcagggcc gctgaatgag atcctcatct gcgggaagtg
    481 tggcctgggt taccaccagc agtgccacat ccccatagcg ggcagtgctg accagcccct
    541 gctcacacct tggttctgcc gacgctgcat cttcgcactg gctgtgcgga aaggcggcgc
    601 gctgaagaag ggcgccatcg ccaggacgct gcaggccgtg aagatggtgc tgtcctacca
    661 gcccgaggag ctcgagtggg actcgcccca tcgcaccaac cagcagcaat gctactgcta
    721 ctgcggcggg cccggagaat ggtacctgcg gatgctgcaa tgttaccggt gcaggcagtg
    781 gttccacgag gcctgcaccc agtgcctcaa tgagcccatg atgtttggag accggtttta
    841 cctgttcttc tgctccgtgt gtaaccaggg cccagagtac atcgagaggc tgcccctgcg
    901 atgggtggat gtggttcacc tggccctcta taatctgggg gtacagagca agaagaagta
    961 ctttgacttt gaggagattc tggcctttgt caaccaccac tgggagctcc tgcagcttgg
  1021 caagctcacc agcaccccag tgacagatcg aggaccacat ctcctcaacg ctctgaacag
  1081 ttataaaagc cggttcctct gcggcaagga gatcaagaag aagaagtgca tcttccgcct
  1141 gcgcatccgc gtcccaccca acccgccagg gaagctgctg cctgacaaag gactgctgcc
  1201 aaatgagaac agcgcctcct ctgagctgcg taagagagga aagagcaagc ctggtttgtt
  1261 gcctcacgaa ttccagcagc agaaaaggcg agtttataga agaaaaagat caaagttttt
  1321 gctggaagat gctattccca gtagtgactt cacctcagcc tggagcacca accaccacct
  1381 ggctagcata tttgacttca cgctggatga aattcaaagt ttaaaaagtg ccagctcagg
  1441 ccagaccttc ttctcagatg tcgactccac cgacgctgcc agcacctctg gctctgcctc
  1501 caccagcctc tcctatgact ccagatggac agtgggcagc cgaaagagga agctggcagc
  1561 caaggcatac atgcccctgc gggcaaagcg gtgggcagct gagctggatg gacgctgccc
  1621 ctcggacagc agtgcagagg gggcttcagt ccccgagcgg ccagacgaag gcattgacag
  1681 ccacacattt gagagcatca gtgaagatga ctcatccctg tcccacctca agtcatctat
  1741 caccaactac tttggtgcag ctgggcggtt ggcctgtggg gagaagtacc aggtgttggc
  1801 tcggagggtc acacctgagg gcaaggttca gtacctggtg gagtgggaag ggaccacccc
  1861 ttactgacta gcccccgggg gtgccagggg tcctgaaaac caaaggagga gcagcagaag
  1921 ccataggctc cccagctttc tccaggctgg ggtgggagaa ggaagcagga cagagctgca
  1981 agtgcctggc agaatgccct gcctgcctgc ctgccaggcc aaggcctgcg tctctctgct
  2041 gtaccagctc tgttccaggg cctcctcagg ctcgttaccc ctgtgcctgt gtctctacac
  2101 actccacacc ccctcaaact ctgtttatct gttctctgac cttgtgtccc ctgcgctggg
  2161 acccttcctc ctgaggccca ggtctttgtc cccagttgtg tgccttgacc tctctcgccc
  2221 ctttctgggt gtgttcgcac atcctgtgtg tgcacagctg tccctccact ggatcccctt
  2281 cacacgtgac ccgtggggca gccagtcctc ccagggacta cataacaggc acctttgaga
  2341 gagcatggga gaaggtggat aagaggatgc tgctcagtgc ttttctcttc cactttcctg
  2401 ccactcccca ctaccctcgg agagaggtgg tgggatggga gagagcccct gtgaaagcct
  2461 gtgaggatct gaagagtaaa gggctgggtc tgcctcagaa ggcaccagca ccagggccca
  2521 ggtattaagg ctgagagtga aggctgccaa tgtcagcttt ggaggtccca gaagtcttct
  2581 gttctctggc ctcaccccct cagtcgccat agagctgggc ctggccttgc tggaatggag
  2641 gcatccttcc aaacctgggg gacgggggtg gggggtggta gtggtgggag ggaaaccatg
  2701 tcttgctaaa cctgtttctg gtgcctccca tccccagacc caccagacac cacacagcag
  2761 acaatacaca cccactcgca caagcttcca tccacatgtg ttgtactttc agctctaggc
  2821 atgcagacaa ccccacacgg ccacaccacc acatgcccaa gtgtacacac acagagccac
  2881 accgtccctc tgggcctgct ggctcctccc ttggctttcc cttggcccac ttccagggcc
  2941 caggtgctgc aactaaatgt gaaagctcag tggccgctcc ttctttcagc ccatcaacca
  3001 gcattggtcc catagggaag cacaggggac tcaccctctt tcatatccct tgccctgccc
  3061 tgaaatggac aatcactttt tgggataggt tgaaattttt aaagagcctg catcatttgg
  3121 ttccctcaaa gggaagccct tgccagtggg ggtttgaaag agaatttttg gaaccaacat
  3181 tcaaattctg cctcatctgg agggaaacca aaattgggag ggggaagagg acccctgatg
  3241 ttttgctgct tccagagata ttagaaactg actcacttga ttggaaaatg gacaaaagtg
  3301 ccttgacgtg gagggtgggc accagatggg gaccagcctt gccaactgct gctgtggcct
  3361 ccagcttggc tggttttgca ggccgccagc aggaaggcga aggtggtagt acagcaagag
  3421 gcactggcgg ggcagcaggc ctgcaggagc tgtttttcca ttgctaggcc tgacccctct
  3481 ctacctgtga gcgttcaggg ggtccctgag atagtttaga tgccccccca tcttagacct
  3541 cagctcccac agtgcctttt aagggggacc tcacctcctg tgcacagccc acccactttc
  3601 ctctgcttcc ctggcacagc ccaggcatag acgagctggc gttggaccca gttcttcccc
  3661 cttttcagcc ccacagctgc tgccacaggg gccaactagg gccaggtgga aggggagctg
  3721 agaagccaac ccctagccca ggggtgctgt gggaactggg atccaatttg tagcttcctg
  3781 cctggcttca gagagcccag caaccttcta ggcctgcttt ccagacttct gagatagcct
  3841 gggatgagca atcctgttat agtacatctg gaccttccct acctgggctc tggggaggct
  3901 gtgggcctgg agagggaaaa ggagggaggg ggtgtctgca ccacctggga agatagcaca
  3961 aggcctaatg aggtcaccct gactccccac cccagcattt cattcatacc agataatagc
  4021 tgcattactg ccaactgacc ttataaccct ctgcaccttc aaaaagattc atggttttta
  4081 attgctgctt ttaataacat ttgttaaagt tataattaat gtgtctgatt tatgatttaa
  4141 aacctccctt tgaacaatca aaaaaaaaaa aaaaaaaaaa a
SETDIA (accession No. XM_005255723):
(SEQ ID NO: 126)
        1 agtggtgttt ggtgcgcgcg ccggggaggt ggtggtgggg gggcgccgcc gccgccaccg
      61 ctgcggggcc gggtctcgcg ctgccgctgc cgccgcctcg cgccgctgag gtgccgcgcg
    121 aggtgggggg agggggagcc gctcgccggg agcggtgtaa atgagcaaag atggatcagg
    181 aaggtggggg agatgggcag aaggccccga gcttccagtg gcggaactac aagctcatcg
    241 tggatcctgc cttggaccct gccctgcgca ggccttctca gaaggtgtac cgctatgatg
    301 gagtccactt cagtgtcaac gactcaaagt atataccagt cgaagacctc caagaccccc
    361 gttgccatgt caggtccaaa aacagagact tttccctccc agtccctaag tttaagctgg
    421 acgagttcta tattggacag attccactga aggaagtgac ttttgcaagg ctgaatgaca
    481 acgtgcggga gaccttcctg aaggatatgt gccgtaagta cggtgaggtg gaagaggtag
    541 agatcctcct tcacccccgt acgcgcaagc acctgggcct ggcccgtgtg ctcttcacca
    601 gcactcgggg cgccaaggaa acggtcaaaa acctccacct tacctccgtc atgggcaaca
    661 tcatccatgc ccagcttgac atcaaaggac aacaacgaat gaaatactat gaactaattg
    721 tcaatggctc ctacacccct cagactgtgc ccactggggg caaggccctg agtgagaagt
    781 tccaaggctc gggtgcagcc actgagacgg ccgaatcccg ccgccgctct tcctctgaca
    841 cagctgccta cccagcaggc accactgcgg tgggcactcc tggcaacggc accccctgct
    901 cccaggacac aagcttctcc agcagccgac aagatacccc atcttccttt ggccagttca
    961 cacctcagtc ctcccaagga accccctaca cgtctcgggg cagcaccccc tactctcagg
  1021 actctgccta ctccagcagc accacttcaa cctccttcaa gccccggcgg tcagagaaca
  1081 gctaccaaga tgccttttcc cgccgccact tctctgcatc ttcagcctcc acaaccgcct
  1141 ccacggccat cgccgccacc actgcagcca ctgcctcatc ctccgcctct tcctcctcat
  1201 tgtcctcgtc ctcctcgtca tcctcttcct cctcgtcctc tcagtttcgt agttctgatg
  1261 caaactaccc agcgtattat gaaagctgga atcgctacca gcgccatact tcctacccac
  1321 cacgccgggc cacacgggag gaaccccctg gagccccttt tgctgaaaat acagctgagc
  1381 gcttcccacc ttcttacacc tcctacctgc cccccgagcc cagccggccc accgaccagg
  1441 actaccggcc tcctgcctca gaggctccac ccccggagcc tccagaacct ggtggaggcg
  1501 ggggtggagg agggcccagc cctgagagag aagaagttcg gacttccccc cgcccagcct
  1561 cccctgcccg ctctggctcc ccagccccgg agaccaccaa tgagagtgtg cccttcgccc
  1621 agcacagcag cctggattcc cgcatcgaga tgctgctgaa ggagcagcgc tccaagtttt
  1681 ccttcttggc ctctgacaca gaggaggagg aagagaacag cagcatggtc cttggggcca
  1741 gagatacagg gagtgaggtg ccttctgggt cagggcatgg gccctgcaca ccccctccgg
  1801 ccccagctaa ttttgaggat gtggcaccta cagggagcgg ggagccaggg gctacccggg
  1861 agtctcccaa ggcaaatgga cagaaccagg cttctccatg ctcttctgga gacgacatgg
  1921 agatctccga cgacgaccgg ggtggctcac cccctccggc cccgacgccc cctcagcagc
  1981 ctccgccacc tccccctccc ccgccgcctc ctcctcccta cctggcgtcc cttcctcttg
  2041 gttatcctcc ccaccaacct gcctacctcc tcccacccag acctgatggg ccgccgcccc
  2101 ctgagtaccc cccacctcct ccaccacccc cgcacatcta tgactttgtg aactccttgg
  2161 agctcatgga ccgacttggg gctcagtggg gagggatgcc catgtccttc cagatgcaga
  2221 cccagatgtt aactcggctc catcagctgc ggcagggcaa gggattgatt gccgcctcag
  2281 ctggcccccc cggtggggcc tttggggagg ccttcctccc gtttccaccc ccgcaggagg
  2341 cagcctacgg cttgccgtat gctctatatg cacaggggca ggagggcaga ggggcatact
  2401 cacgggaggc ctaccacctg cccatgccaa tggcagccga gcccctgccc tcctcctcag
  2461 tctcgggaga ggaggcccgg ctgccaccca gggaagaagc agagctggca gagggcaaga
  2521 ccctcccgac agcaggcacc gtgggccgtg tgctcgccat gctggtccag gagatgaaga
  2581 gcatcatgca gcgagacctc aaccgcaaga tggtggagaa cgtggccttc ggagcctttg
  2641 accagtggtg ggagagcaag gaggagaagg ccaagccatt ccagaacgcg gccaagcagc
  2701 aagccaagga ggaggataaa gagaagacga agctgaagga gcctggcctg ctgtccctcg
  2761 tggactgggc caagagcggg ggcactacgg gcatcgaggc tttcgccttt gggtcagggc
  2821 tgagaggggc cctgcggctg ccttcattca aggtaaagcg gaaagagcca tcggaaattt
  2881 ccgaggccag tgaggaaaag aggcctcgtc cctccactcc tgctgaggaa gatgaagacg
  2941 accctgaaca agagaaggag gctggagagc caggacgtcc ggggaccaag cccccgaagc
  3001 gggacgaaga gcgaggcaag acccagggca agcaccgcaa gtcctttgct ctggacagcg
  3061 aaggggagga ggcatcccag gagtcctcct cggagaagga tgaggaggat gacgaggaag
  3121 atgaggaaga tgaagatcga gaggaagctg tggataccac aaagaaggag acagaggtgt
  3181 cggatggcga ggacgaggaa agcgattcgt cttccaaatg ttctctgtat gctgactcag
  3241 atggcgaaaa tgacagcaca tcagactccg agagcagcag ctcttccagc tcctcatcct
  3301 cctcctcctc ctcgtcctca tcctcctcgt cctcttcatc ctctgagtcc tcctctgaag
  3361 atgaagagga agaggagcgg ccagcagccc ttccctcagc ctccccgccc cccagagaag
  3421 tcccagtgcc cacgccagca cctgtggagg tgccagtgcc ggaaagggtt gcaggctccc
  3481 cagtcacacc cctgcccgaa caggaggcgt ctccagcaag gcctgcaggc cccacggagg
  3541 agtcaccccc cagtgcgcct ctgcgtcccc cagaaccacc tgctgggccc ccggcccctg
  3601 ccccacgccc cgatgagcgt ccctcttctc ccatccccct cctgccccca cccaagaaac
  3661 gccggaaaac tgtctccttc tctgccatcg aggtggtgcc agccccggag ccccctccag
  3721 ccacaccgcc gcaggccaag tttcccggcc cagcctcccg caaggctccc cggggcgtgg
  3781 agcggaccat ccgcaacctg cccctggacc acgcatctct ggtcaagagt tggcccgagg
  3841 aggtgtcccg aggaggccgg agccgggctg gaggccgagg ccgcctcacc gaggaagagg
  3901 aggctgagcc agggacagag gtggacctgg cggtcctggc cgacctggcc ctgacccctg
  3961 cccggcgcgg gctgcctgcc ctgcctgctg ttgaagactc agaggccaca gagacatcgg
  4021 acgaggccga gcgccctagg cccctgctca gccacatcct cctggagcac aactatgccc
  4081 tggccgtcaa gcccacgccc cctgcgccag ccctgcggcc cccggagcca gtgcccgcac
  4141 ccgccgccct cttcagttcc ccagctgatg aggtcctgga ggcccccgag gtggtggtgg
  4201 ctgaggcgga ggagcccaag ccgcagcaac tgcagcagca gcgggaggag ggcgaagagg
  4261 agggggagga agagggggag gaagaggagg aggagtcctc tgacagcagc agcagcagcg
  4321 atggggaggg cgccctccgg aggcgcagcc tccgctccca cgcccggcgc cgccgccctc
  4381 cgcccccacc cccgccgcca ccgccccgcg cctacgagcc acgcagtgag tttgaacaga
  4441 tgaccatcct gtatgacatt tggaactcgg gcctggactc agaggacatg agttacctgc
  4501 ggcttacgta cgagcggctg ctgcagcaga caagcggggc tgactggctc aacgacactc
  4561 actgggtcca tcacacaatc accaacctga ccaccccaaa acgcaagcgg cggccccagg
  4621 atgggccccg ggagcaccag acaggctcag cccgcagcga aggctactac cccatcagca
  4681 agaaggagaa ggacaagtac ctggacgtgt gcccagtctc ggcccggcag ctggagggcg
  4741 tggacactca ggggacgaac cgcgtgctgt ccgagcgccg gtccgagcag cggcggctgc
  4801 tgagcgccat cggtacctcc gccatcatgg acagtgacct gctgaaactc aaccagctca
  4861 agttccggaa gaagaagctc cgatttggcc ggagccggat ccacgagtgg ggtctgtttg
  4921 ccatggaacc cattgctgct gacgagatgg tcatcgaata cgtgggtcag aacatccgtc
  4981 agatggtggc cgacatgcgg gagaagcgct acgtgcagga gggcattggc agcagctacc
  5041 tgttccgggt ggaccacgac accatcatcg atgccaccaa gtgtggcaac ctggccagat
  5101 tcatcaacca ctgctgcacg cctaactgct acgccaaggt catcaccatc gagtcccaga
  5161 agaagatcgt gatctactcc aagcagccca ttggcgtgga cgaggagatc acctacgact
  5221 acaagttccc actggaagac aacaagatcc cgtgtctgtg tggcacagag agctgccggg
  5281 gctccctaaa ctgaggtggg gcaggatggg tgcccacacc cctatttatt ccccctggtg
  5341 ccctgagctc ccagcacccc cccagcctta gtgggctcag cagggcccac atgcccccat
  5401 ctccaagcgt ggggttgggg gccccaagcc cagcgaggga gcctcagtcc ctggaggcag
  5461 cttctgcctc tcctgtcacc cctgcccacc accccctgat tgtttttctt tgcggagaag
  5521 aagctgtaaa tgttttgtag cagccagcag ctgtttcctg tggaaacctg gggtgccggc
  5581 ctgtacagat tctgtcctgg ggggctacac agtcctcttg ctttgtgtta atggggactt
  5641 ccccttacgc cctgcgtgta cccctcccca gtttaggggt ctctggggca gtggccatgt
  5701 tctccccctg ggggggctct gcacccccag tcctggggac tccgtgcctg gaaccctgcc
  5761 tcatctgttc ctgccagacc ctgagggtca cccttccacc ctggtgtcac tccccggctc
  5821 agccaggcca ggatggcggg gtgggtccct tttgctgggc tggactgtac atatgttaat
  5881 agcgcaaacc cgacgccaca tttttataat tgtgattaaa ctttattgta caaaa
SETD1B (accession No. NM_015048):
(SEQ ID NO: 127)
        1 aacggcatgg agaacagtca ccccccccac caccaccacc agcagccccc gccgcagccc
      61 ggcccttcgg gcgagaggag gaaccaccat tggagaagtt acaagttgat gattgacccg
    121 gctctgaaaa aggggcatca taaactgtac cgctacgatg ggcagcattt cagcctggcg
    181 atgtccagca accgcccggt ggaaattgtc gaagatcccc gggtcgtcgg gatctggacc
    241 aaaaacaagg agctggagct gtcggtgccc aaattcaaga tcgatgagtt ctacgtgggc
    301 ccggtgcctc cgaagcaggt gacatttgcc aagctgaatg ataacatccg tgaaaacttc
    361 ctgagggaca tgtgcaagaa gtatggggag gtggaggagg tggagatttt gtacaacccc
    421 aagaccaaga agcacctggg catcgccaag gtggtctttg ccacggtccg gggagccaag
    481 gatgccgttc agcacttgca cagcacttcc gtcatgggca acattatcca cgtggagctg
    541 gacaccaaag gggaaacccg aatgcggttc tatgaactgt tggtcactgg ccgatacacc
    601 ccccagaccc tcccagtggg cgagctggac gctgtctctc caatcgtgaa tgagaccctg
    661 cagctgtcag atgccctgaa gcgcctcaag gatggaggcc tgtctgcagg ctgtggctcc
    721 ggctcctcct ctgtcacccc caatagcggt gggacaccct tctcccagga cacagcttat
    781 tccagctgcc gcctggacac acccaactcc tatggacagg gcaccccgct cacaccgcgc
    841 ctgggcaccc ctttctcaca ggactccagc tactccagcc gccagcccac accctcatac
    901 ctcttcagcc aggaccctgc agtgaccttc aaggcccggc gccacgagag caagttcacg
    961 gacgcctaca accgccgcca cgaacatcat tatgtacaca attctcccgc ggtcactgcg
  1021 gtggccgggg ccacagccgc tttccggggt tcctcggacc tcccgttcgg agcagtcggc
  1081 ggcactgggg gcagcagcgg tcccccgttc aaggctcaac cacaggattc agccacattt
  1141 gcccacactc caccacccgc ccaagcaacc cctgctcctg gattcaagtc tgctttctct
  1201 ccgtatcaga ccccagtggc ccacttccct ccacccccgg aagagcccac cgccacagcc
  1261 gcttttgggg cccgcgacag tggggagttc cggagggcac cggcgccccc acccctgcca
  1321 cctgctgagc ctctggccaa ggagaagcca ggcacgccac ccggcccgcc gccccccgac
  1381 accaacagca tggagctggg cggccggccc accttcggct ggagtcctga gccctgtgac
  1441 agccctggca cgcccacgct ggagtcgtcc cctgcagggc cagagaaacc ccacgacagc
  1501 ctggactcgc gcatcgagat gctgctgaag gagcagcgca ccaagctgct cttcctgagg
  1561 gagccggact cggacaccga gctgcagatg gagggcagcc ccatctcctc ctcctcctcc
  1621 cagctctccc cactggcccc ctttggcacc aactcccagc caggcttccg gggccccacg
  1681 cccccctcgt cacgcccctc cagcaccggc ctggaggata tcagcccaac acccctccca
  1741 gactccgacg aggacgagga gctcgacctg ggccttgggc ctcggcctcc acctgagcca
  1801 ggccccccgg accctgctgg gcttctgagc cagacagctg aggtggcctt ggacctggtt
  1861 ggagacagaa ccccgacctc agagaagatg gatgagggcc agcagtcctc aggcgaggac
  1921 atggagatct cggatgacga gatgccctcg gcccccatca ccagcgctga ctgccccaag
  1981 cccatggtgg tgaccccagg agcggcagcc gtggcagccc cttctgtgct agccccaacc
  2041 ctgccgctgc ccccgccacc tggcttcccc ccgctgcccc ccccaccacc accaccccca
  2101 ccgcagcctg gcttccccat gcccccaccg ctgcccccac cgccgccccc accccctcca
  2161 gcccaccctg ctgtgacagt gcccccacca cccttgccag cgccgcctgg agtcccgccc
  2221 ccacccatcc tgccaccact gccccccttt ccgccgggcc tgttccctgt gatgcaggtg
  2281 gacatgagcc acgtgctggg tggccagtgg ggcggcatgc ccatgtcctt ccagatgcaa
  2341 acgcaggtgc tcagccggct gatgacgggc cagggcgcct gcccctaccc gcccttcatg
  2401 gccgctgcgg ccgccgctgc ctcagctggg ctccagtttg tcaacctgcc gccctaccgg
  2461 ggccccttct ccctgagcaa ctccggccca ggccgcgggc agcactggcc accactgccc
  2521 aagtttgacc cgtcagtgcc tccaccaggc tacatgccac gccaggagga cccacacaaa
  2581 gccacggtgg atggcgtcct gctggtggtc ctcaaagaac tcaaggccat catgaagcgt
  2641 gacctgaacc gcaagatggt ggaagtggtg gctttccggg cctttgacga gtggtgggac
  2701 aagaaggagc ggatggccaa ggcctcgctg accccggtga agtcgggcga gcacaaggac
  2761 gaggacaggc cgaagcccaa ggaccgcatc gcctcgtgcc tgctggagtc atggggcaag
  2821 ggcgagggcc tgggctacga gggcctgggc ctgggcattg ggctgcgtgg ggccattcgc
  2881 ctgccctcct tcaaggtcaa gaggaaggag ccaccagaca ccacctcatc tggcgaccag
  2941 aagcggctgc ggccctcgac ctctgtggat gaggaagatg aagagtccga gcgagagcga
  3001 gaccgggata tggcagacac cccctgtgag ctcgccaagc gggaccccaa gggcgtgggt
  3061 gtgcggcggc ggccggcgcg gcctctggag ctggacagtg gtggggagga ggacgagaag
  3121 gagtcattgt cggaggaaca ggagagcacc gaggaggaag aggaggcgga ggaggaggag
  3181 gaggaggaag atgacgacga tgacgacagt gatgaccggg acgagtctga gaacgatgac
  3241 gaggacacag ccctgtcaga ggcgagtgag aaggacgaag gggactcgga tgaagaggag
  3301 acagtgagca ttgtaacctc caaggccgaa gccacgtcgt ccagtgagag ttccgagtct
  3361 tctgagtttg agtcaagctc cgagtcctcg ccctcatcct cggaggatga ggaggaggta
  3421 gtggccaggg aagaggagga agaagaggag gaggaggaga tggtggccga ggaaagcatg
  3481 gcttctgcag gccctgagga ctttgagcag gacggggagg aagcggctct ggccccgggg
  3541 gcacctgcag tggactcgtt gggcatggaa gaggaggtgg acatcgagac tgaggctgtg
  3601 gcccctgagg agcggccctc catgctggac gagcccccct tgcctgtggg tgttgaagag
  3661 ccagcggact ccagggagcc gcctgaggaa ccaggcctga gccaggaagg ggccatgttg
  3721 ctgtctccag agccccctgc caaggaggtg gaggctcgac ccccattgtc ccctgagcga
  3781 gctccagaac atgacctgga agtggagccg gagcccccta tgatgctccc cttgccgctg
  3841 caaccaccat tgccgccccc acgaccaccc cggccaccca gcccaccgcc ggagcctgag
  3901 accacagatg cctcacaccc atctgtccct ccggagcccc ttgccgagga ccaccccccg
  3961 catactccag gcctctgtgg cagcctggcc aagtcgcaga gcacagagac ggtgccagcc
  4021 acaccaggcg gggagccccc gctatcaggg ggcagcagtg gcctgtccct gagctctccg
  4081 caagtgcccg gcagcccctt ctcctaccca gccccgtccc ctagcttgag cagtgggggc
  4141 ctccctcgga cacctggccg ggacttcagc ttcacaccca ccttctccga gcccagcggg
  4201 cccttgctcc tgcccgtctg cccactcccc actggccgac gcgatgaacg ctccgggccc
  4261 ctggcctccc cggtgctcct ggagacgggc ctgcccctcc ctctgcccct tcccctgccc
  4321 ttgcccttgg cattgcccgc cgtcttgcgg gcccaggctc gtgcgcccac cccgctgcca
  4381 cccctgctgc ccgcccccct ggcctcttgc cctcccccaa tgaagaggaa gccgggccgg
  4441 ccccggcgat ccccaccatc tatgctctcc ttggatgggc ccttggtccg accaccagca
  4501 ggggccgccc ttggaaggga actcctgctc ctgccgggcc agccacagac ccccgtcttc
  4561 cccagcaccc atgacccccg gacggtgacc ctggacttcc ggaacgcggg gatcccagcc
  4621 cctccaccac cccttccccc ccagccaccc ccacccccac ctcccccacc tgtagagccc
  4681 accaagctgc cctttaagga gctagacaac cagtggccct ccgaggccat tcctccgggc
  4741 ccccgtgggc gcgatgaggt cactgaggaa tacatggagt tggccaagag ccgggggccg
  4801 tggcgccggc cacctaagaa gcgccatgag gacctggtgc cacctgcggg ctcgcccgaa
  4861 ctctcgccac cccagcccct cttccggccc cgctcggagt ttgaggagat gaccatcctg
  4921 tatgacatct ggaacggtgg catcgatgag gaggacatcc gcttcctgtg tgtcacctac
  4981 gagcgactgc tacagcagga caatggcatg gactggctta acgacacgct ctgggtctac
  5041 catccctcca ccagcctctc ttcagctaag aagaagaaac gggacgatgg catccgcgag
  5101 cacgtgacgg gctgtgcccg cagtgagggc ttctacacca tcgacaagaa ggacaagctc
  5161 agatacctca acagcagccg tgccagcacc gatgagcccc ccgcagacac ccagggcatg
  5221 agcatcccag cacagcccca cgcctccacc cgggcaggct cggagcggcg ttcggagcag
  5281 cgccgcctgc tgtcctcctt cactggcagc tgtgacagtg acctgctcaa gttcaaccag
  5341 ctcaagttcc ggaagaaaaa gctcaagttc tgcaagagcc acattcacga ctggggcttg
  5401 ttcgccatgg agcccatcgc ggctgacgag atggtcatcg agtacgtggg ccagaatatc
  5461 cgtcaggtga tcgcagacat gcgggagaag cgttatgagg acgagggcat cgggagcagc
  5521 tacatgttcc gggtggacca tgacaccatc atcgacgcca ccaagtgcgg caacttcgcg
  5581 cgcttcatca accacagctg caaccccaac tgctatgcca aggtgatcac ggtggagtca
  5641 cagaagaaga tagtcatcta ctcgaagcag cacattaacg tcaatgagga gattacctat
  5701 gactataagt tccccatcga ggacgtcaag atcccctgcc tctgtggctc cgagaactgc
  5761 cgggggaccc tcaactaggc cccggcacca gactcaaagg atgtcagccg tagccctggg
  5821 actcccgagc gtggagcccc tggccccggg gcccggcccc ccgcgcccgc ccccatttca
  5881 ggtgctgtcc tctacccagc ggccattcag ggcctggcgc cccacactac cccctggagc
  5941 ccctggctcc ggcccctccg cgggaaaggg cttctctgtc gttcagccca cgtctctctc
  6001 attttaacaa acgccccttt caggatttct gtttaactcc agcatcagct tctctctctc
  6061 cgtctctcct cccctctctc tcttctctgt ctcttctctc tcccaccatc accctcggcc
  6121 tcttcctgtg aatgctgcta cgttgttttg tcttctctat ttttttcctc gttgtgagaa
  6181 aagacattta accgttgaaa tgtgaaggtg gaatcagaga ggggccccgc gggggtctgc
  6241 agaggcctca gtgtggctgt gcgtggcccg tgtcctggaa gccacccgga cctggacgca
  6301 gggccaggtg ctgtgggaag gatggaggcc cccacggcct tgacctcaga acactacgcc
  6361 ctgaaagcgc ccctcactgc ccgtgggcac agtgaggaga ccccacacct ttccccaccc
  6421 gagctgcagc ctgttccttc cccagaggcc tggggcacca ctgacccggt ggaccctgat
  6481 ggagctaagc tgtcccaggc aggggtctcc gctctgggct ttccctgcca cctcacaccc
  6541 cagcaccccc taaaccttgg gttcaatgtt tactttctca ttcggatgcc agcaacgcgg
  6601 gagcctctcg gaggccccag tgcaggtgag gggcgctgag aacgcgggca gccactctct
  6661 tctgcccttg ccttcgccct gggtgggaca gggctcccaa gggcaggcgg gtcccccagt
  6721 cccgccatta cgggttgtca gaccgtctgc gtgtggcatt ttttggctta taagcttcac
  6781 ccactcaccc ccaacccaca ccccacatcc ccctgccggc agcccctcaa cctaagaagg
  6841 ccagagcata tttattttcg gagggagcag attacttctc ccagagaaag gaaaatcttg
  6901 gaaaagattt aaaaacacaa atctaagcct tgacggtttt tttttccctt ttgaccccct
  6961 tcccatctct tcagaattta ttcccatggc tttttttttt cttgtgcgtg tataaaatca
  7021 aaaggaaggg gaaaaaggtt tttgaagttc agaaccaact tctgtatata gaggctgccg
  7081 caaaggactt tctcttggga acattgtttc ttgtagaaac atgcgggaag acattttttg
  7141 ctcatttctt tgtacttcca aaaaaaaagg aaaaaaaaga caaaagcaag tccccccgta
  7201 ccccagaaag cagaggaggc gtgtaaataa tttctggaaa gtgactgttg tgacccggag
  7261 tcctcatcaa gatgagcgcg ctccatgagg gagctgctcc caccctgcgg acgcaggcgg
  7321 ccggagcctc tggtatctca gcttgtgtca agcttgttat catgtaaatt ctgtacaaag
  7381 aattgttatt tttctctttt ttgttgttgg tggttttgtt gtgtgttttt tgttgttttt
  7441 tttttattcc tttcccccag gccctctcta tttgagactg tgcccgccgg tttcaagatc
  7501 aaggaaattg gtggcaacaa gacacagatg gggtacctgg gcacagcggc gaacttctct
  7561 tccgtttgcg gttttctgcc taattgtgca actgaggaaa taatttattt ttcacatgag
  7621 gaaatgcgta gcttgtagag acggctgatt caagttacat gtacagcctc caaagggctg
  7681 tctccattct gtccccttcc cataaaagaa gtgggggtgt tcgagaagac cagggaaggg
  7741 acccttgcct cacccctccc cctggcctca ccttgctccc agccatcgtg cccagtgtta
  7801 acctcggctg gccttcacta aggggactag acctccctct ccccaggagc cccagcccca
  7861 gagtggtttg caataatcaa gatatgtgtc gagtcatttt tctttcaact ccctcatttt
  7921 tcattgaaca aatctctgct tttcaagagt tgggggtttc tgctattttt tgctttctct
  7981 ccctccccct gcaaagatga gaaccaatga gttttaggga tgtttgtgcg ggtagactcc
  8041 atcatccata tgtaacttgt tttgaagaga agtgtttccg ttgtgtgtct tgatgtaaat
  8101 atttgttcat atttttgtga attcaatact atgtaccatt gtattatagt aacttttata
  8161 aagcaaacca taaatatact gacttttctt acaga
CXXC1 (accession No. NM_001101654):
(SEQ ID NO: 128)
        1 ggaaagagtg gtggcaggtg aagtcggaga cgacagagga actggtttcc tccgccccgc
      61 aaggcacaca gcctgccgac gccccattaa tacatgtgga aggggaaaga gactgaatgg
    121 aggaatgaat acaacttgat ccaggtcgtg cttcggaagc ggtcacttta cctgtgaacc
    181 tctctgcctg acaaacgggc aatgtacgga atcaaccacc aagatggcgg cgcccgtgaa
    241 gaatccgcaa ttaggtcgcc gtcatatgtc gcctaggaac gtacggaatt cgacccacgt
    301 acggaatcgg attccaagat gacggcatct atgaggaagt cacgcagtag gtgcagccat
    361 gttgcctgta cgtcgaggcc gtacaagcag ccgccgtacg gactctactg acaaggtggc
    421 ggcgccctcg ggaaagccac attagagcgc ggccatgttc ccggcgaaca tatggattcg
    481 gccaccatac ggatacgata agcaagatgg cggcgcctga ggggtcttgg gggctctagg
    541 ccggccacct actggtttgc agcggagacg acgcatgggg cctgcgcaat aggagtacgc
    601 tgcctgggag gcgtgactag aagcggaagt agttgtgggc gcctttgcaa ccgcctggga
    661 cgccgccgag tggtctgtgc aggttcgcgg gtcgctggcg ggggtcgtga gggagtgcgc
    721 cgggagcgga gatatggagg gagatggttc agacccagag cctccagatg ccggggagga
    781 cagcaagtcc gagaatgggg agaatgcgcc catctactgc atctgccgca aaccggacat
    841 caactgcttc atgatcgggt gtgacaactg caatgagtgg ttccatgggg actgcatccg
    901 gatcactgag aagatggcca aggccatccg ggagtggtac tgtcgggagt gcagagagaa
    961 agaccccaag ctagagattc gctatcggca caagaagtca cgggagcggg atggcaatga
  1021 gcgggacagc agtgagcccc gggatgaggg tggagggcgc aagaggcctg tccctgatcc
  1081 agacctgcag cgccgggcag ggtcagggac aggggttggg gccatgcttg ctcggggctc
  1141 tgcttcgccc cacaaatcct ctccgcagcc cttggtggcc acacccagcc agcatcacca
  1201 gcagcagcag cagcagatca aacggtcagc ccgcatgtgt ggtgagtgtg aggcatgtcg
  1261 gcgcactgag gactgtggtc actgtgattt ctgtcgggac atgaagaagt tcgggggccc
  1321 caacaagatc cggcagaagt gccggctgcg ccagtgccag ctgcgggccc gggaatcgta
  1381 caagtacttc ccttcctcgc tctcaccagt gacgccctca gagtccctgc caaggccccg
  1441 ccggccactg cccacccaac agcagccaca gccatcacag aagttagggc gcatccgtga
  1501 agatgagggg gcagtggcgt catcaacagt caaggagcct cctgaggcta cagccacacc
  1561 tgagccactc tcagatgagg acctacctct ggatcctgac ctgtatcagg acttctgtgc
  1621 aggggccttt gatgaccatg gcctgccctg gatgagcgac acagaagagt ccccattcct
  1681 ggaccccgcg ctgcggaaga gggcagtgaa agtgaagcat gtgaagcgtc gggagaagaa
  1741 gtctgagaag aaggtgatgg agaggaagga ggagcgatac aagcggcatc ggcagaagca
  1801 gaagcacaag gataaatgga aacacccaga gagggctgat gccaaggacc ctgcgtcact
  1861 gccccagtgc ctggggcccg gctgtgtgcg ccccgcccag cccagctcca agtattgctc
  1921 agatgactgt ggcatgaagc tggcagccaa ccgcatctac gagatcctcc cccagcgcat
  1981 ccagcagtgg cagcagagcc cttgcattgc tgaagagcac ggcaagaagc tgctcgaacg
  2041 cattcgccga gagcagcaga gtgcccgcac tcgccttcag gaaatggaac gccgattcca
  2101 tgagcttgag gccatcattc tacgtgccaa gcagcaggct gtgcgcgagg atgaggagag
  2161 caacgagggt gacagtgatg acacagacct gcagatcttc tgtgtttcct gtgggcaccc
  2221 catcaaccca cgtgttgcct tgcgccacat ggagcgctgc tacgccaagt atgagagcca
  2281 gacgtccttt gggtccatgt accccacacg cattgaaggg gccacacgac tcttctgtga
  2341 tgtgtataat cctcagagca aaacatactg taagcggctc caggtgctgt gccccgagca
  2401 ctcacgggac cccaaagtgc cagctgacga ggtatgcggg tgcccccttg tacgtgatgt
  2461 ctttgagctc acgggtgact tctgccgcct gcccaagcgc cagtgcaatc gccattactg
  2521 ctgggagaag ctgcggcgtg cggaagtgga cttggagcgc gtgcgtgtgt ggtacaagct
  2581 ggacgagctg tttgagcagg agcgcaatgt gcgcacagcc atgacaaacc gcgcgggatt
  2641 gctggccctg atgctgcacc agacgatcca gcacgatccc ctcactaccg acctgcgctc
  2701 cagtgccgac cgctgagcct cctggcccgg accccttaca ccctgcattc cagatggggg
  2761 agccgcccgg tgcccgtgtg tccgttcctc cactcatctg tttctccggt tctccctgtg
  2821 cccatccacc ggttgaccgc ccatctgcct ttatcagagg gactgtcccc gtcgacatgt
  2881 tcagtgcctg gtggggctgc ggagtccact catccttgcc tcctctccct gggttttgtt
  2941 aataaaattt tgaagaaacc aaggaaaaaa aaaaaa
ASH2L (accession No. NM_004674):
(SEQ ID NO: 129)
        1 cacagcaacg cgcgcgagag aagagagtat tctcgcgaga agtccagggg tggccgtgat
      61 ggcggcggca ggagcaggac ctggccagga agcgggtgcc gggcctggcc caggagcggt
    121 cgcaaatgca acaggggcag aagaggggga gatgaagccg gtggcagcgg gagcagccgc
    181 tcctcctgga gaggggatct ctgctgctcc gacagttgag cccagttccg gggaggctga
    241 aggcggggag gcaaacttgg tcgatgtaag cggtggcttg gagacagaat catctaatgg
    301 aaaagataca ctagaaggtg ctggggatac atcagaggtg atggatactc aggcgggctc
    361 cgtggatgaa gagaatggcc gacagttggg tgaggtagag ctgcaatgtg ggatttgtac
    421 aaaatggttc acggctgaca catttggcat agatacctca tcctgtctac ctttcatgac
    481 caactacagt tttcattgca acgtctgcca tcacagtggg aatacctatt tcctccggaa
    541 gcaagcaaac ttgaaggaaa tgtgccttag tgctttggcc aacctgacat ggcagtcccg
    601 aacacaggat gaacatccga agacaatgtt ctccaaagat aaggatatta taccatttat
    661 tgataaatac tgggagtgca tgacaaccag acagagacct gggaaaatga cttggccaaa
    721 taacattgtt aaaacaatga gtaaagaaag agatgtattc ttggtaaagg aacacccaga
    781 tccaggcagt aaagatccag aagaagatta ccccaaattt ggacttttgg atcaggacct
    841 tagtaacatt ggtcctgctt atgacaacca aaaacagagc agtgctgtgt ctactagtgg
    901 gaatttaaat gggggaattg cagcaggaag cagcggaaaa ggacgaggag ccaagcgcaa
    961 acagcaggat ggagggacca cagggaccac caagaaggcc cggagtgacc ctttgttttc
  1021 tgctcagcgc cttccccctc atggctaccc attggaacac ccgtttaaca aagatggcta
  1081 tcggtatatt ctagctgagc ctgatccgca cgcccctgac cccgagaagc tggaacttga
  1141 ctgctgggca ggaaaaccta ttcctggaga cctctacaga gcctgcttgt atgaacgggt
  1201 tttgttagcc ctacatgatc gagctcccca gttaaagatc tcagatgacc ggctgactgt
  1261 ggttggagag aagggctact ctatggtgag ggcctctcat ggagtacgga aaggtgcctg
  1321 gtattttgaa atcactgtgg atgagatgcc accagatacc gctgccagac tgggttggtc
  1381 ccagccccta ggaaaccttc aagctccttt aggttatgat aaatttagct attcttggcg
  1441 gagcaaaaag ggaaccaagt tccaccagtc cattggcaaa cactactctt ctggctatgg
  1501 acagggagac gtcctgggat tttatattaa tcttcctgaa gacacagaga cagccaagtc
  1561 attgccagac acatacaaag ataaggcttt gataaaattc aagagttatt tgtattttga
  1621 ggaaaaagac tttgtggata aagcagagaa gagcctgaag cagactcccc atagtgagat
  1681 aatattttat aaaaatggtg tcaatcaagg tgtggcttac aaagatattt ttgagggggt
  1741 ttacttccca gccatctcac tgtacaagag ctgcacggtt tccattaact ttggaccatg
  1801 cttcaagtat cctccgaagg atctcactta ccgccctatg agtgacatgg gctggggcgc
  1861 cgtggtagag cacaccctgg ctgacgtctt gtatcacgtg gagacagaag tggatgggag
  1921 gcgcagtccc ccatgggaac cctgaccagg tccctctttt ctgtcaagga ctttctggga
  1981 ataatactgg gggttttgtt tttgtttttg aactgtctca aatgttctcc caaagatgct
  2041 aaaaacacag cctctccttt tagcaagtta aaaggctggg taggactgcg ggagactgcc
  2101 tgcctttcac cattttctcc ccacttccag tgactgctct tattttgtgt accataagcc
  2161 aacaaccgct gactccagga ttgcataagc cccctgtgaa atcggtgctg tactgcatac
  2221 cctgccagct gtgacttgtt atcctactat attttctaag gagtgaataa tattgtccga
  2281 gtaactaact tatttaaaag acatttcctt ctgtgggcat tgactgtatc ccacctgttt
  2341 tccaaggaaa tggtaacctg tttctgagaa cacctgaaat caatggctat acattccaaa
  2401 ccaatctaaa cgctatttcc ttttggtgtg ggtttggttt tgttcatttt gaaatacact
  2461 tttgaacact gagatccgta aaactactag atctctggaa gtgtaattgt gaaagaaact
  2521 tgcttgcagc tttaacaaaa tgagaaactt cccaaataaa acttgttttg aagtttatgt
  2581 gacactttgc ttcccttcag attgggtgcc tcttggtgac agtgttcaga aatgtaagca
  2641 gcacgaggaa gggagctggc actgggagga agagccgggt ttctgagttg tgttttggct
  2701 gctttcctat tgctcccatt cttgccaatc agccaccccc tttcctgtga aaatctgcca
  2761 ccttgaggag aggaacaaga gtttaaaagg gctaatgatc tccctcccgg tcttcccttg
  2821 gaacatggat gttgatatat gtgcgggtgg tttcctgtct tgcttatctt cctttgccct
  2881 gagctgatgg ctaaagggca gttttcggac tattaaagac tgaaatgtaa gaatgagcct
  2941 tctaggctgg gcgc
DPY30 (accession No. NM_032574):
(SEQ ID NO: 130)
        1 tggcgcggtg cagggctctt aagaacgaac ggcttgggcg cgggtaatca gctccctttc
      61 ccccactttc tcacttattc taggtacttg ggactgtcgt agagtttcca gaccccatgt
    121 aggcgcccag tcgtggactg tcccactctg ctgctctact gctcgtggtg ctcccgcgcc
    181 cagactggta tccggggact gtgacttgca gggtccgcca tggagccaga gcagatgctg
    241 gagggacaaa cgcaggttgc agaaaatcct cactctgagt acggtctcac agacaacgtt
    301 gagagaatag tagaaaatga gaagattaat gcagaaaagt catcaaagca gaaggtagat
    361 ctccagtctt tgccaactcg tgcctacctg gatcagacag ttgtgcctat cttattacag
    421 ggacttgctg tgcttgcaaa ggaaagacca ccaaatccca ttgaatttct agcatcttat
    481 cttttaaaaa acaaggcaca gtttgaagat cgaaactgac ttaatgggaa gaacagaaaa
    541 atttagttgc tactgtagat ttacatgatt aagaggcagc tttaattgcc atgatcattc
    601 cctctttttg gatgtataag aaccttccgg acaacagaac ctatttctgg aattgcagaa
    661 gataacatat ttcccttatt ttgatttaat caccataaac catacctatt taatgagtgt
    721 attctgtgca atttttttct cagattgtct ttaactttgt ttttaaaatg accttcaaaa
    781 taaactgtca aaacaccatt
RBBP5 (accession No. NM_005057):
(SEQ ID NO: 131)
        1 ggaagccgcg gggccttcta aggccgaaag tcttcggagc ttgcgccagt ctcttcgcgg
      61 cgtccaccac ttagacgcaa gttgctgaag ccggccgggg agaaggtgtt gttgccggag
    121 ctgagaccgg gcggccacag tccgcaggga tgaacctcga gttgctggag tcctttgggc
    181 agaactatcc agaggaagct gatggaactt tggattgtat cagcatggct ttgacttgca
    241 cctttaacag gtggggcaca ctgcttgcag ttggctgtaa tgatggccga attgtcatct
    301 gggatttctt gacaagaggc attgctaaaa taattagtgc acacatccat ccagtgtgtt
    361 ctttatgctg gagccgagat ggtcataaac tcgtgagtgc ttccactgat aacatagtgt
    421 cacagtggga tgttctttca ggcgactgtg accagaggtt tcgattccct tcacccatct
    481 taaaagtcca atatcatcca cgagatcaga acaaggttct cgtgtgtccc atgaaatctg
    541 ctcctgtcat gttgaccctt tcagattcca aacatgttgt tctgccggtg gacgatgact
    601 ccgatttgaa cgttgtggca tcttttgata ggcgagggga atatatttat acgggaaacg
    661 caaaaggcaa gattttggtc ctaaaaacag attctcagga tcttgttgct tccttcagag
    721 tgacaactgg aacaagcaat accacagcca ttaagtcaat tgagtttgcc cggaagggga
    781 gttgcttttt aattaacacg gcagatcgaa taatcagagt ttatgatggc agagaaatct
    841 taacatgtgg aagagatgga gagcctgaac ctatgcagaa attgcaggat ttggtgaata
    901 ggaccccatg gaagaaatgt tgtttctctg gggatgggga atacatcgtg gcaggttctg
    961 cccggcagca tgccctgtac atctgggaga agagcattgg caacctggtg aagattctcc
  1021 atgggacgag aggagaactc ctcttggatg tagcttggca tcctgttcga cccatcatag
  1081 catccatttc cagtggagtg gtatctatct gggcacagaa tcaagtagaa aactggagtg
  1141 catttgcacc agacttcaaa gaattggatg aaaatgtaga atacgaagaa agggaatcag
  1201 agtttgatat tgaagatgaa gataagagtg agcctgagca gacaggggct gatgctgcag
  1261 aagatgagga agtggatgtc accagcgtgg accctattgc tgccttctgt agcagtgatg
  1321 aagagctgga agattcaaag gctctattgt atttacccat tgcccctgag gtagaagacc
  1381 cagaagaaaa tccttacggc cccccaccgg atgcagtcca aacctccttg atggatgaag
  1441 gggctagttc agagaagaag aggcagtcct cagcagatgg gtcccagcca cctaagaaga
  1501 aacccaaaac aaccaatata gaacttcaag gagtaccaaa tgatgaagtc catccactac
  1561 tgggtgtgaa gggggatggc aaatccaaga agaagcaagc aggccggcct aaaggatcaa
  1621 aaggtaaaga gaaagattct ccatttaaac cgaaactcta caaaggggac agaggtttac
  1681 ctctggaagg atcagcgaag ggtaaagtgc aggcggaact cagccagccc ttgacagcag
  1741 gaggagcaat ctcagaactg ttatgaagac cttcgaagtt cttcattctt tctcactttg
  1801 ccatcatgtg gcctctggac actgtggtca gtcatttgaa aattgacttt aatttaaaac
  1861 aaaggcctgt gcctcccacc caggaggtgg gagggtgaat tttatgttta aatgaagaag
  1921 tgaattatgg aagaagagta tacgaccttc ccttcccttt caagcataag tccaaataga
  1981 ctctcaggaa tgaagatttg tgaagacatc agataggaat tttgactcat ttaaactttg
  2041 atgcttagtt atgttgctgg agaaaagata cttatgtttt gctcatctaa cttcattgta
  2101 cccagcgtca ttttgacatg tcatttccta tctcccattt gccttcggtc ctcaatgcat
  2161 gtctttgagt gacttcttat ctgaaatttt gctactggta tcctaggaaa gcttttgttg
  2221 gatactctca ttttaaactt ctcctctccc cagatacctc ctatatttcc atattgtgtg
  2281 caaaggatgg gcagaaaaga aagtgcttga aagatttcaa attttcagaa agggaacaac
  2341 gaaggccctc tcttcctctc ataccacgtt ttgctcaaga agctgggctg taacaattca
  2401 gggttttccc ttgttttcct ctcattgcat gtttccctcc aatattggtt cattgtcatc
  2461 aatcatggtt tttgaagata gctagtttta tccatctcca gcaaagaatc atcaatagtt
  2521 tatattgctt tacctgtgct ggcttccaga gatggaaaca aacccaggtg tctctcaaca
  2581 agctactttt ttactggggt gggggaatct atgcaaggag taaagtaaaa ccatccagaa
  2641 tcaaagcagc aaccacatag ttcaaatcaa agatcaaggt gaattttttg tatcactgcc
  2701 tgtggaaatc tatcctcatc agtcattgca tttttccctg cctatacctg tgctcctttt
  2761 tcttactgtg ttttcagtca cttcctttct gtgaaaggtt gcttagcttt ttttttgaca
  2821 tttgttgttc tttataaaaa taacagattg gatagatgtg tacatttggt gtttgaaatt
  2881 ctctgaaaat cccattagga aaccaggtgt gaaaagggct cagtagcttc tctgagtggc
  2941 gtttttagct gactggaagt gcttaatctg gatcgtcttt tttttttttt tttttttttc
  3001 aatattttaa aaggagaatt taaatactgt gcttactgtg aaatatatca gttggtgagc
  3061 cgggcgtggt gggtcacgcc tgtaatccca gcactttggg aggccaaggc gggttgatca
  3121 cccgaggtca ggagttcaag accagcctgg ccaacgtggt gaaagcctgt atctattaaa
  3181 agacaaaaat tagctgggcg tggtagtaca tgcctgtaat cccagctaca ctggaggctg
  3241 agtcaggaga atcacttgaa cgtgggaggc agaggttgca gtgagtggag atcgcaccac
  3301 tgccctccag cctaggtgac agaatgagac tctatctcaa aaaaaaaaaa aaaatgatat
  3361 cagttggtgg atgctcctat aggtagccaa acacattgat tacctgttag attttaggat
  3421 agaaatcaaa gtagagcacg tcagcaagag cctctttgtc tcactccatc atttaaaacc
  3481 agtatattca gtagttgaag aaagagctct ccctgagtca gttgcaaaac gtctatattt
  3541 ttagatgcca ctactttttt cttaaatatt cattttgaga ctgtcatgag ttagaccagt
  3601 ggttgagatt agtagatggc tcactagaca tgtttttgtt ttgcagacat tatatccatt
  3661 ccagtcctct gcactgtaca ctgcagcagt gtgcaaacta tgggacttag agggtttctg
  3721 ccatctttcc acgtgtgaag tagcttggtt tcctctgcct gtgcatttgg atgtttgtgc
  3781 tatgtccacc tcctaaactg gctactgaga aaatcatctt cagccctgtc agattgtctc
  3841 tggcagtagc tcctaataat tatttatgtt tttggaattt ttttttcaac ttttaaaaaa
  3901 ccttctatcc atttcaattt gaattatttg atttgtacaa tatatgtata ttctcttctt
  3961 cctttttgtc atccctgccc tgccaccccc aaaattttgt ttttaaaaat attctgggct
  4021 gggcatggtg gctcacacct gtaatcccag cacttgggga ggccgaggct ggtggatcat
  4081 ctgaggtcag gtgtttgaga ccagcctggt caacatggtg aaaccccgtc tctactaaaa
  4141 atacaaaaat tagctgggcg tggtggcggg cacctgtaat cctagctact cgggaggctg
  4201 aggcaggaga attgcttgaa tccaggaggc agaggttgca gtgagctgag attgcgccac
  4261 tgcactccag cctgggtgac agagcaagac tccatctcaa aaaaaaaaaa aaaaaaaaat
  4321 ctgtagtttt gtacaagatg agacttagcc ttgggtactt cttgctgaag ctttaatgct
  4381 ttgtaaataa aatcggatgt ttattaaaga aaaaaaaaaa aaa
WDR5 (accession No. NM_017588):
(SEQ ID NO: 132)
        1 gccgcctggc gcccgcccga gctgccgcct tgtcgagctg agtccgcgct cccgcccagg
      61 cggcggccga cgcgacgccc cgagcgcccg gccccgccgc cgcggcccgg cagactgcct
    121 ctgtcaccgg gtccctccac ccttgtctcc tgtgcggcca gcgtcagagc catggcgacg
    181 gaggagaaga agcccgagac cgaggccgcc agagcacagc caaccccttc gtcatccgcc
    241 actcagagca agcctacacc tgtgaagcca aactatgctc taaagttcac ccttgctggc
    301 cacaccaaag cagtgtcctc cgtgaaattc agcccgaatg gagagtggct ggcaagttca
    361 tctgctgata aacttattaa aatttggggc gcgtatgatg ggaaatttga gaaaaccata
    421 tctggtcaca agctgggaat atccgatgta gcctggtcgt cagattctaa ccttcttgtt
    481 tctgcctcag atgacaaaac cttgaagata tgggacgtga gctcgggcaa gtgtctgaaa
    541 accctgaagg gacacagtaa ttatgtcttt tgctgcaact tcaatcccca gtccaacctt
    601 attgtctcag gatcctttga cgaaagcgtg aggatatggg atgtgaaaac agggaagtgc
    661 ctcaagactt tgccagctca ctcggatcca gtctcggccg ttcattttaa tcgtgatgga
    721 tccttgatag tttcaagtag ctatgatggt ctctgtcgca tctgggacac cgcctcaggc
    781 cagtgcctga agacgctcat cgatgacgac aacccccccg tgtcttttgt gaagttctcc
    841 ccgaacggca aatacatcct ggccgccacg ctggacaaca ctctgaagct ctgggactac
    901 agcaagggga agtgcctgaa gacgtacact ggccacaaga atgagaaata ctgcatattt
    961 gccaatttct ctgttactgg tgggaagtgg attgtgtctg gctcagagga taaccttgtt
  1021 tacatctgga accttcagac gaaagagatt gtacagaaac tacaaggcca cacagatgtc
  1081 gtgatctcaa cagcttgtca cccaacagaa aacatcatcg cctctgctgc gctagaaaat
  1141 gacaaaacaa ttaaactgtg gaagagtgac tgctaagtcc ctttgctcct gcccgcgaga
  1201 gactgtcggg aagttgaccc ggattggcaa gaaacagggt gtcttggagg tggtccccca
  1261 gatctgcgcc tgggggtcag gacagggcct gatttgagcc tcctctctga agatgatttg
  1321 gccgagcgga aggtgtggac caccggaaag ttcttaaaag ttgctggtga catttcttgc
  1381 caattctaac actgtctagg gaagagttcc tagtctattg tgttcaaaca gagtcaacaa
  1441 aagtttttaa ttttttatta cagaagggtg aagttcaatt taacatgcgt tgtgtttttt
  1501 cagtaaacgt tctgtatctt tttgatattc catgacccag tgcacgctgt ggcctgtcac
  1561 cgccaccgtg gccccgccag ctggcctccc ctttggccca cgccggccgc ccccattctc
  1621 tgctgcgtag atgccctggc ccagggccct gactcctcca ttcccgccag tagctgttcc
  1681 tagtgtattt tcgtctttct ggaaaacagc attgagtggt tgttttctgt gtaaagagcc
  1741 gtttgtgtct tgggagtttg tggcccacat gccgatagca cggtcatcgc acatgactct
  1801 cccgtttgtc tcagtgtccc tgcaacaagc agcaccgcag actgtaataa aaggtggggt
  1861 tttgtgaatg gttgtggcaa gtgcgtcctt gtgaagctcg tctccatgtg gctttcttgg
  1921 agaaaggctc ccctggggca agagggtgga aggtttcttt ggacaggagg tgctgaggct
  1981 ggctgcacct gctctctgaa gacgccttcc tctctaggtt cattgttcag tgttgctggg
  2041 ggcggggaac gggggtgggg aggttcttag ttgcgaagga gccaagctcc tgatggactt
  2101 gcgttgggat gtgggggaca cctgtggcat ggtaaggctc cctgagtccc ttactccagg
  2161 tcagatgcca gtgggactca tgcgccctat gagggctgca gggccagtgc tgcccctcgg
  2221 actcctcgag gggttgggtg ctaagcgcga gcctcgccgt ccctgctgga gccctcgcct
  2281 gcctgcccct ctgcctgtgc tcctggcagt gtggcttccc ggtgctcacc tgcacagcag
  2341 ttaacagcag aggccgagcg ggagcctctg gggagcgagg ctgaaacctg aacctgccca
  2401 tggagacagt tgtggtgagg gttgccacac acagtgaggg cggagcaggg tggctgaggg
  2461 cacaggtgcc tgggtctgtc ccacggggca gggctttggg gctgtgatgc tctgggaagc
  2521 cagcttgggt cctgggtcta cagagggccc tggccccgga gcccagccag ctctgcctct
  2581 ctcagggcct ggagtcctgg gggagctcag ccagctctgc ctttctcagg gcctggagtc
  2641 ctggatgaat cctgcaggtt tttggttgca ccggcccagg gaggaagcgg ggggtttgtc
  2701 aggtgggctc tcctggaggt cctcgagtgg caggggtgag gaggggatta tctgaggcat
  2761 ctggagatgt atatcctgtg gtttcccctg cccctctgtt tccgatgagg tgtacggatg
  2821 agtgacctgc actaagaagt gagttgccac agtgaaaatg ggttggtttt tgtcttcgac
  2881 gctcagggtc tgggcgcctc gcatttgcag tctgttgtga cagacacggg gagctccgcg
  2941 tgccagcctg tggctgccct gctgtggggg tcctggggcc ggcgaggccc cttcagtctt
  3001 gttctggggg gacggcccac tccggggagg gggtgtgctg tgctgagcgc tgtatccctg
  3061 aatatagttt attttttcta catttgaatt ctgttgtaga tttatgtaaa aatacattct
  3121 ttttgaaaat aaaaattttc atgtcttcta atttaaaaaa aaa
KMT2A (accession No. NM_001197104):
(SEQ ID NO: 133)
        1 ctgcttcact tcacggggcg aacatggcgc acagctgtcg gtggcgcttc cccgcccgac
      61 ccgggaccac cgggggcggc ggcggcgggg ggcgccgggg cctagggggc gccccgcggc
    121 aacgcgtccc ggccctgctg cttccccccg ggcccccggt cggcggtggc ggccccgggg
    181 cgcccccctc ccccccggct gtggcggccg cggcggcggc ggcgggaagc agcggggctg
    241 gggttccagg gggagcggcc gccgcctcag cagcctcctc gtcgtccgcc tcgtcttcgt
    301 cttcgtcatc gtcctcagcc tcttcagggc cggccctgct ccgggtgggc ccgggcttcg
    361 acgcggcgct gcaggtctcg gccgccatcg gcaccaacct gcgccggttc cgggccgtgt
    421 ttggggagag cggcggggga ggcggcagcg gagaggatga gcaattctta ggttttggct
    481 cagatgaaga agtcagagtg cgaagtccca caaggtctcc ttcagttaaa actagtcctc
    541 gaaaacctcg tgggagacct agaagtggct ctgaccgaaa ttcagctatc ctctcagatc
    601 catctgtgtt ttcccctcta aataaatcag agaccaaatc tggagataag atcaagaaga
    661 aagattctaa aagtatagaa aagaagagag gaagacctcc caccttccct ggagtaaaaa
    721 tcaaaataac acatggaaag gacatttcag agttaccaaa gggaaacaaa gaagatagcc
    781 tgaaaaaaat taaaaggaca ccttctgcta cgtttcagca agccacaaag attaaaaaat
    841 taagagcagg taaactctct cctctcaagt ctaagtttaa gacagggaag cttcaaatag
    901 gaaggaaggg ggtacaaatt gtacgacgga gaggaaggcc tccatcaaca gaaaggataa
    961 agaccccttc gggtctcctc attaattctg aactggaaaa gccccagaaa gtccggaaag
  1021 acaaggaagg aacacctcca cttacaaaag aagataagac agttgtcaga caaagccctc
  1081 gaaggattaa gccagttagg attattcctt cttcaaaaag gacagatgca accattgcta
  1141 agcaactctt acagagggca aaaaaggggg ctcaaaagaa aattgaaaaa gaagcagctc
  1201 agctgcaggg aagaaaggtg aagacacagg tcaaaaatat tcgacagttc atcatgcctg
  1261 ttgtcagtgc tatctcctcg cggatcatta agacccctcg gcggtttata gaggatgagg
  1321 attatgaccc tccaattaaa attgcccgat tagagtctac accgaatagt agattcagtg
  1381 ccccgtcctg tggatcttct gaaaaatcaa gtgcagcttc tcagcactcc tctcaaatgt
  1441 cttcagactc ctctcgatct agtagcccca gtgttgatac ctccacagac tctcaggctt
  1501 ctgaggagat tcaggtactt cctgaggagc ggagcgatac ccctgaagtt catcctccac
  1561 tgcccatttc ccagtcccca gaaaatgaga gtaatgatag gagaagcaga aggtattcag
  1621 tgtcggagag aagttttgga tctagaacga cgaaaaaatt atcaactcta caaagtgccc
  1681 cccagcagca gacctcctcg tctccacctc cacctctgct gactccaccg ccaccactgc
  1741 agccagcctc cagtatctct gaccacacac cttggcttat gcctccaaca atccccttag
  1801 catcaccatt tttgcctgct tccactgctc ctatgcaagg gaagcgaaaa tctattttgc
  1861 gagaaccgac atttaggtgg acttctttaa agcattctag gtcagagcca caatactttt
  1921 cctcagcaaa gtatgccaaa gaaggtctta ttcgcaaacc aatatttgat aatttccgac
  1981 cccctccact aactcccgag gacgttggct ttgcatctgg tttttctgca tctggtaccg
  2041 ctgcttcagc ccgattgttt tcgccactcc attctggaac aaggtttgat atgcacaaaa
  2101 ggagccctct tctgagagct ccaagattta ctccaagtga ggctcactct agaatatttg
  2161 agtctgtaac cttgcctagt aatcgaactt ctgctggaac atcttcttca ggagtatcca
  2221 atagaaaaag gaaaagaaaa gtgtttagtc ctattcgatc tgaaccaaga tctccttctc
  2281 actccatgag gacaagaagt ggaaggctta gtagttctga gctctcacct ctcacccccc
  2341 cgtcttctgt ctcttcctcg ttaagcattt ctgttagtcc tcttgccact agtgccttaa
  2401 acccaacttt tacttttcct tctcattccc tgactcagtc tggggaatct gcagagaaaa
  2461 atcagagacc aaggaagcag actagtgctc cggcagagcc attttcatca agtagtccta
  2521 ctcctctctt cccttggttt accccaggct ctcagactga aagagggaga aataaagaca
  2581 aggcccccga ggagctgtcc aaagatcgag atgctgacaa gagcgtggag aaggacaaga
  2641 gtagagagag agaccgggag agagaaaagg agaataagcg ggagtcaagg aaagagaaaa
  2701 ggaaaaaggg atcagaaatt cagagtagtt ctgctttgta tcctgtgggt agggtttcca
  2761 aagagaaggt tgttggtgaa gatgttgcca cttcatcttc tgccaaaaaa gcaacagggc
  2821 ggaagaagtc ttcatcacat gattctggga ctgatattac ttctgtgact cttggggata
  2881 caacagctgt caaaaccaaa atacttataa agaaagggag aggaaatctg gaaaaaacca
  2941 acttggacct cggcccaact gccccatccc tggagaagga gaaaaccctc tgcctttcca
  3001 ctccttcatc tagcactgtt aaacattcca cttcctccat aggctccatg ttggctcagg
  3061 cagacaagct tccaatgact gacaagaggg ttgccagcct cctaaaaaag gccaaagctc
  3121 agctctgcaa gattgagaag agtaagagtc ttaaacaaac cgaccagccc aaagcacagg
  3181 gtcaagaaag tgactcatca gagacctctg tgcgaggacc ccggattaaa catgtctgca
  3241 gaagagcagc tgttgccctt ggccgaaaac gagctgtgtt tcctgatgac atgcccaccc
  3301 tgagtgcctt accatgggaa gaacgagaaa agattttgtc ttccatgggg aatgatgaca
  3361 agtcatcaat tgctggctca gaagatgctg aacctcttgc tccacccatc aaaccaatta
  3421 aacctgtcac tagaaacaag gcaccccagg aacctccagt aaagaaagga cgtcgatcga
  3481 ggcggtgtgg gcagtgtccc ggctgccagg tgcctgagga ctgtggtgtt tgtactaatt
  3541 gcttagataa gcccaagttt ggtggtcgca atataaagaa gcagtgctgc aagatgagaa
  3601 aatgtcagaa tctacaatgg atgccttcca aagcctacct gcagaagcaa gctaaagctg
  3661 tgaaaaagaa agagaaaaag tctaagacca gtgaaaagaa agacagcaaa gagagcagtg
  3721 ttgtgaagaa cgtggtggac tctagtcaga aacctacccc atcagcaaga gaggatcctg
  3781 ccccaaagaa aagcagtagt gagcctcctc cacgaaagcc cgtcgaggaa aagagtgaag
  3841 aagggaatgt ctcggcccct gggcctgaat ccaaacaggc caccactcca gcttccagga
  3901 agtcaagcaa gcaggtctcc cagccagcac tggtcatccc gcctcagcca cctactacag
  3961 gaccgccaag aaaagaagtt cccaaaacca ctcctagtga gcccaagaaa aagcagcctc
  4021 caccaccaga atcaggtcca gagcagagca aacagaaaaa agtggctccc cgcccaagta
  4081 tccctgtaaa acaaaaacca aaagaaaagg aaaaaccacc tccggtcaat aagcaggaga
  4141 atgcaggcac tttgaacatc ctcagcactc tctccaatgg caatagttct aagcaaaaaa
  4201 ttccagcaga tggagtccac aggatcagag tggactttaa ggaggattgt gaagcagaaa
  4261 atgtgtggga gatgggaggc ttaggaatct tgacttctgt tcctataaca cccagggtgg
  4321 tttgctttct ctgtgccagt agtgggcatg tagagtttgt gtattgccaa gtctgttgtg
  4381 agcccttcca caagttttgt ttagaggaga acgagcgccc tctggaggac cagctggaaa
  4441 attggtgttg tcgtcgttgc aaattctgtc acgtttgtgg aaggcaacat caggctacaa
  4501 agcagctgct ggagtgtaat aagtgccgaa acagctatca ccctgagtgc ctgggaccaa
  4561 actaccccac caaacccaca aagaagaaga aagtctggat ctgtaccaag tgtgttcgct
  4621 gtaagagctg tggatccaca actccaggca aagggtggga tgcacagtgg tctcatgatt
  4681 tctcactgtg tcatgattgc gccaagctct ttgctaaagg aaacttctgc cctctctgtg
  4741 acaaatgtta tgatgatgat gactatgaga gtaagatgat gcaatgtgga aagtgtgatc
  4801 gctgggtcca ttccaaatgt gagaatcttt caggtacaga agatgagatg tatgagattc
  4861 tatctaatct gccagaaagt gtggcctaca cttgtgtgaa ctgtactgag cggcaccctg
  4921 cagagtggcg actggccctt gaaaaagagc tgcagatttc tctgaagcaa gttctgacag
  4981 ctttgttgaa ttctcggact accagccatt tgctacgcta ccggcaggct gccaagcctc
  5041 cagacttaaa tcccgagaca gaggagagta taccttcccg cagctccccc gaaggacctg
  5101 atccaccagt tcttactgag gtcagcaaac aggatgatca gcagccttta gatctagaag
  5161 gagtcaagag gaagatggac caagggaatt acacatctgt gttggagttc agtgatgata
  5221 ttgtgaagat cattcaagca gccattaatt cagatggagg acagccagaa attaaaaaag
  5281 ccaacagcat ggtcaagtcc ttcttcattc ggcaaatgga acgtgttttt ccatggttca
  5341 gtgtcaaaaa gtccaggttt tgggagccaa ataaagtatc aagcaacagt gggatgttac
  5401 caaacgcagt gcttccacct tcacttgacc ataattatgc tcagtggcag gagcgagagg
  5461 aaaacagcca cactgagcag cctcctttaa tgaagaaaat cattccagct cccaaaccca
  5521 aaggtcctgg agaaccagac tcaccaactc ctctgcatcc tcctacacca ccaattttga
  5581 gtactgatag gagtcgagaa gacagtccag agctgaaccc acccccaggc atagaagaca
  5641 atagacagtg tgcgttatgt ttgacttatg gtgatgacag tgctaatgat gctggtcgtt
  5701 tactatatat tggccaaaat gagtggacac atgtaaattg tgctttgtgg tcagcggaag
  5761 tgtttgaaga tgatgacgga tcactaaaga atgtgcatat ggctgtgatc aggggcaagc
  5821 agctgagatg tgaattctgc caaaagccag gagccaccgt gggttgctgt ctcacatcct
  5881 gcaccagcaa ctatcacttc atgtgttccc gagccaagaa ctgtgtcttt ctggatgata
  5941 aaaaagtata ttgccaacga catcgggatt tgatcaaagg cgaagtggtt cctgagaatg
  6001 gatttgaagt tttcagaaga gtgtttgtgg actttgaagg aatcagcttg agaaggaagt
  6061 ttctcaatgg cttggaacca gaaaatatcc acatgatgat tgggtctatg acaatcgact
  6121 gcttaggaat tctaaatgat ctctccgact gtgaagataa gctctttcct attggatatc
  6181 agtgttccag ggtatactgg agcaccacag atgctcgcaa gcgctgtgta tatacatgca
  6241 agatagtgga gtgccgtcct ccagtcgtag agccggatat caacagcact gttgaacatg
  6301 atgaaaacag gaccattgcc catagtccaa catcttttac agaaagttca tcaaaagaga
  6361 gtcaaaacac agctgaaatt ataagtcctc catcaccaga ccgacctcct cattcacaaa
  6421 cctctggctc ctgttattat catgtcatct caaaggtccc caggattcga acacccagtt
  6481 attctccaac acagagatcc cctggctgtc gaccgttgcc ttctgcagga agtcctaccc
  6541 caaccactca tgaaatagtc acagtaggtg atcctttact ctcctctgga cttcgaagca
  6601 ttggctccag gcgtcacagt acctcttcct tatcacccca gcggtccaaa ctccggataa
  6661 tgtctccaat gagaactggg aatacttact ctaggaataa tgtttcctca gtctccacca
  6721 ccgggaccgc tactgatctt gaatcaagtg ccaaagtagt tgatcatgtc ttagggccac
  6781 tgaattcaag tactagttta gggcaaaaca cttccacctc ttcaaatttg caaaggacag
  6841 tggttactgt aggcaataaa aacagtcact tggatggatc ttcatcttca gaaatgaagc
  6901 agtccagtgc ttcagacttg gtgtccaaga gctcctcttt aaagggagag aagaccaaag
  6961 tgctgagttc caagagctca gagggatctg cacataatgt ggcttaccct ggaattccta
  7021 aactggcccc acaggttcat aacacaacat ctagagaact gaatgttagt aaaatcggct
  7081 cctttgctga accctcttca gtgtcgtttt cttctaaaga ggccctctcc ttcccacacc
  7141 tccatttgag agggcaaagg aatgatcgag accaacacac agattctacc caatcagcaa
  7201 actcctctcc agatgaagat actgaagtca aaaccttgaa gctatctgga atgagcaaca
  7261 gatcatccat tatcaacgaa catatgggat ctagttccag agataggaga cagaaaggga
  7321 aaaaatcctg taaagaaact ttcaaagaaa agcattccag taaatctttt ttggaacctg
  7381 gtcaggtgac aactggtgag gaaggaaact tgaagccaga gtttatggat gaggttttga
  7441 ctcctgagta tatgggccaa cgaccatgta acaatgtttc ttctgataag attggtgata
  7501 aaggcctttc tatgccagga gtccccaaag ctccacccat gaagtagaa ggatctgcca
  7561 aggaattaca ggcaccacgg aaacgcacag tcaaagtgac actgacacct ctaaaaatgg
  7621 aaaatgagag tcaatccaaa aatgccctga aagaaagtag tcctgcttcc cctttgcaaa
  7681 tagagtcaac atctcccaca gaaccaattt cagcctctga aaatccagga gatggtccag
  7741 tggcccaacc aagccccaat aatacctcat gccaggattc tcaaagtaac aactatcaga
  7801 atcttccagt acaggacaga aacctaatgc ttccagatgg ccccaaacct caggaggatg
  7861 gctcttttaa aaggaggtat ccccgtcgca gtgcccgtgc acgttctaac atgttttttg
  7921 ggcttacccc actctatgga gtaagatcct atggtgaaga agacattcca ttctacagca
  7981 gctcaactgg gaagaagcga ggcaagagat cagctgaagg acaggtggat ggggccgatg
  8041 acttaagcac ttcagatgaa gacgacttat actattacaa cttcactaga acagtgattt
  8101 cttcaggtgg agaggaacga ctggcatccc ataatttatt tcgggaggag gaacagtgtg
  8161 atcttccaaa aatctcacag ttggatggtg ttgatgatgg gacagagagt gatactagtg
  8221 tcacagccac aacaaggaaa agcagccaga ttccaaaaag aaatggtaaa gaaaatggaa
  8281 cagagaactt aaagattgat agacctgaag atgctgggga gaaagaacat gtcactaaga
  8341 gttctgttgg ccacaaaaat gagccaaaga tggataactg ccattctgta agcagagtta
  8401 aaacacaggg acaagattcc ttggaagctc agctcagctc attggagtca agccgcagag
  8461 tccacacaag taccccctcc gacaaaaatt tactggacac ctataatact gagctcctga
  8521 aatcagattc agacaataac aacagtgatg actgtgggaa tatcctgcct tcagacatta
  8581 tggactttgt actaaagaat actccatcca tgcaggcttt gggtgagagc ccagagtcat
  8641 cttcatcaga actcctgaat cttggtgaag gattgggtct tgacagtaat cgtgaaaaag
  8701 acatgggtct ttttgaagta ttttctcagc agctgcctac aacagaacct gtggatagta
  8761 gtgtctcttc ctctatctca gcagaggaac agtttgagtt gcctctagag ctaccatctg
  8821 atctgtctgt cttgaccacc cggagtccca ctgtccccag ccagaatccc agtagactag
  8881 ctgttatctc agactcaggg gagaagagag taaccatcac agaaaaatct gtagcctcct
  8941 ctgaaagtga cccagcactg ctgagcccag gagtagatcc aactcctgaa ggccacatga
  9001 ctcctgatca ttttatccaa ggacacatgg atgcagacca catctctagc cctccttgtg
  9061 gttcagtaga gcaaggtcat ggcaacaatc aggatttaac taggaacagt agcacccctg
  9121 gccttcaggt acctgtttcc ccaactgttc ccatccagaa ccagaagtat gtgcccaatt
  9181 ctactgatag tcctggcccg tctcagattt ccaatgcagc tgtccagacc actccacccc
  9241 acctgaagcc agccactgag aaactcatag ttgttaacca gaacatgcag ccactttatg
  9301 ttctccaaac tcttccaaat ggagtgaccc aaaaaatcca attgacctct tctgttagtt
  9361 ctacacccag tgtgatggag acaaatactt cagtattggg acccatggga ggtggtctca
  9421 cccttaccac aggactaaat ccaagcttgc caacttctca atctttgttc ccttctgcta
  9481 gcaaaggatt gctacccatg tctcatcacc agcacttaca ttccttccct gcagctactc
  9541 aaagtagttt cccaccaaac atcagcaatc ctccttcagg cctgcttatt ggggttcagc
  9601 ctcctccgga tccccaactt ttggtttcag aatccagcca gaggacagac ctcagtacca
  9661 cagtagccac tccatcctct ggactcaaga aaagacccat atctcgtcta cagacccgaa
  9721 agaataaaaa acttgctccc tctagtaccc cttcaaacat tgccccttct gatgtggttt
  9781 ctaatatgac attgattaac ttcacaccct cccagcttcc taatcatcca agtctgttag
  9841 atttggggtc acttaatact tcatctcacc gaactgtccc caacatcata aaaagatcta
  9901 aatctagcat catgtatttt gaaccggcac ccctgttacc acagagtgtg ggaggaactg
  9961 ctgccacagc ggcaggcaca tcaacaataa gccaggatac tagccacctc acatcagggt
10021 ctgtgtctgg cttggcatcc agttcctctg tcttgaatgt tgtatccatg caaactacca
10081 caacccctac aagtagtgcg tcagttccag gacacgtcac cttaaccaac ccaaggttgc
10141 ttggtacccc agatattggc tcaataagca atcttttaat caaagctagc cagcagagcc
10201 tggggattca ggaccagcct gtggctttac cgccaagttc aggaatgttt ccacaactgg
10261 ggacatcaca gaccccctct actgctgcaa taacagcggc atctagcatc tgtgtgctcc
10321 cctccactca gactacgggc ataacagccg cttcaccttc tggggaagca gacgaacact
10381 atcagcttca gcatgtgaac cagctccttg ccagcaaaac tgggattcat tcttcccagc
10441 gtgatcttga ttctgcttca gggccccagg tatccaactt tacccagacg gtagacgctc
10501 ctaatagcat gggactggag cagaacaagg ctttatcctc agctgtgcaa gccagcccca
10561 cctctcctgg gggttctcca tcctctccat cttctggaca gcggtcagca agcccttcag
10621 tgccgggtcc cactaaaccc aaaccaaaaa ccaaacggtt tcagctgcct ctagacaaag
10681 ggaatggcaa gaagcacaaa gtttcccatt tgcggaccag ttcttctgaa gcacacattc
10741 cagaccaaga aacgacatcc ctgacctcag gcacagggac tccaggagca gaggctgagc
10801 agcaggatac agctagcgtg gagcagtcct cccagaagga gtgtgggcaa cctgcagggc
10861 aagtcgctgt tcttccggaa gttcaggtga cccaaaatcc agcaaatgaa caagaaagtg
10921 cagaacctaa aacagtggaa gaagaggaaa gtaatttcag ctccccactg atgctttggc
10981 ttcagcaaga acaaaagcgg aaggaaagca ttactgagaa aaaacccaag aaaggacttg
11041 tttttgaaat ttccagtgat gatggctttc agatctgtgc agaaagtatt gaagatgcct
11101 ggaagtcatt gacagataaa gtccaggaag ctcgatcaaa tgcccgccta aagcagctct
11161 catttgcagg tgttaacggt ttgaggatgc tggggattct ccatgatgca gttgtgttcc
11221 tcattgagca gctgtctggt gccaagcact gtcgaaatta caaattccgt ttccacaagc
11281 cagaggaggc caatgaaccc cccttgaacc ctcacggctc agccagggct gaagtccacc
11341 tcaggaagtc agcatttgac atgtttaact tcctggcttc taaacatcgt cagcctcctg
11401 aatacaaccc caatgatgaa gaagaggagg aggtacagct gaagtcagct cggagggcaa
11461 ctagcatgga tctgccaatg cccatgcgct tccggcactt aaaaaagact tctaaggagg
11521 cagttggtgt ctacaggtct cccatccatg gccggggtct tttctgtaag agaaacattg
11581 atgcaggtga gatggtgatt gagtatgccg gcaacgtcat ccgctccatc cagactgaca
11641 agcgggaaaa gtattacgac agcaagggca ttggttgcta tatgttccga attgatgact
11701 cagaggtagt ggatgccacc atgcatggaa atgctgcacg cttcatcaat cactcgtgtg
11761 agcctaactg ctattctcgg gtcatcaata ttgatgggca gaagcacatt gtcatctttg
11821 ccatgcgtaa gatctaccga ggagaggaac tcacttacga ctataagttc cccattgagg
11881 atgccagcaa caagctgccc tgcaactgtg gcgccaagaa atgccggaag ttcctaaact
11941 aaagctgctc ttctccccca gtgttggagt gcaaggaggc ggggccatcc aaagcaacgc
12001 tgaaggcctt ttccagcagc tcggagctcc cggattgcgt ggcacagctg aggggcctct
12061 gtgatggctg agctctctta tgtcctatac tcacatcaga catgtgatca tagtcccaga
12121 gacagagttg aggtctcgaa gaaaagatcc atgatcggct ttctcctggg gcccctccaa
12181 ttgtttactg ttagaaagtg ggaatggggt ccctagcaga cttgcctgga aggagcctat
12241 tatagagggt tggttatgtt gggagattgg gcctgaattt ctccacagaa ataagttgcc
12301 atcctcaggt tggccctttc ccaagcactg taagtgagtg ggtcaggcaa agccccaaat
12361 ggagggttgg ttagattcct gacagtttgc cagccaggcc ccacctacag cgtctgtcga
12421 acaaacagag gtctggtggt tttccctact atcctcccac tcgagagttc acttctggtt
12481 gggagacagg attcctagca cctccggtgt caaaaggctg tcatggggtt gtgccaatta
12541 attaccaaac attgagcctg caggctttga gtgggagtgt tgcccccagg agccttatct
12601 cagccaatta cctttcttga cagtaggagc ggcttccctc tcccattccc tcttcactcc
12661 cttttcttcc tttcccctgt cttcatgcca ctgctttccc atgcttcttt cgggttgtag
12721 gggagactga ctgcctgctc aaggacactc cctgctgggc ataggatgtg cctgcaaaaa
12781 gttccctgag cctgtaagca ctccaggtgg ggaagtggac aggagccatt ggtcataacc
12841 agacagaatt tggaaacatt ttcataaagc tccatggaga gttttaaaga aacatatgta
12901 gcatgatttt gtaggagagg aaaaagatta tttaaatagg atttaaatca tgcaacaacg
12961 agagtatcac agccaggatg acccttgggt cccattccta agacatggtt actttatttt
13021 ccccttgtta agacatagga agacttaatt tttaaacggt cagtgtccag ttgaaggcag
13081 aacactaatc agatttcaag gcccacaact tggggactag accaccttat gttgagggaa
13141 ctctgccacc tgcgtgcaac ccacagctaa agtaaattca atgacactac tgccctgatt
13201 actccttagg atgtggtcaa aacagcatca aatgtttctt ctcttccttt ccccaagaca
13261 gagtcctgaa cctgttaaat taagtcattg gattttactc tgttctgttt acagtttact
13321 atttaaggtt ttataaatgt aaatatattt tgtatatttt tctatgagaa gcacttcata
13381 gggagaagca cttatgacaa ggctattttt taaaccgcgg tattatccta atttaaaaga
13441 agatcggttt ttaataattt tttattttca taggatgaag ttagagaaaa tattcagctg
13501 tacacacaaa gtctggtttt tcctgcccaa cttccccctg gaaggtgtac tttttgttgt
13561 ttaatgtgta gcttgtttgt gccctgttga cataaatgtt tcctgggttt gctctttgac
13621 aataaatgga gaaggaaggt cacccaactc cattgggcca ctcccctcct tcccctattg
13681 aagctcctca aaaggctaca gtaatatctt gatacaacag attctcttct ttcccgcctc
13741 tctcctttcc ggcgcaactt ccagagtggt gggagacggc aatctttaca tttccctcat
13801 ctttcttact tcagagttag caaacaacaa gttgaatggc aacttgacat ttttgcatca
13861 ccatctgcct cataggccac tctttccttt ccctctgccc accaagtcct catatctgca
13921 gagaacccat tgatcacctt gtgccctctt ttggggcagc ctgttgaaac tgaagcacag
13981 tctgaccact cacgataaag cagatttttc tctgcctctg ccacaaggtt tcagagtagt
14041 gtagtccaag tagagggtgg ggcacccttt tctcgccgca agaagcccat tcctatggaa
14101 gtctagcaaa gcaatacgac tcagcccagc actctctgcc ccaggactca tggctctgct
14161 gtgccttcca tcctgggctc ccttctctcc tgtgacctta agaactttgt ctggtggctt
14221 tgctggaaca ttgtcactgt tttcactgtc atgcagggag cccagcactg tggccaggat
14281 ggcagagact tccttgtcat catggagaag tgccagcagg ggactgggaa aagcactcta
14341 cccagacctc acctcccttc ctccttttgc ccatgaacaa gatgcagtgg ccctaggggt
14401 tccactagtg tctgctttcc tttattattg cactgtgtga ggtttttttg taaatccttg
14461 tattcctatt ttttttaaag aaaaaaaaaa aaccttaagc tgcatttgtt actgaaatga
14521 ttaatgcact gatgggtcct gaattcacct tgagaaagac ccaaaggcca gtcagggggt
14581 ggggggaact cagctaaata gacctagtta ctgccctgct aggccatgct gtactgtgag
14641 cccctcctca ctctctacca accctaaacc ctgaggacag gggaggaacc cacagcttcc
14701 ttctcctgcc agctgcagat ggtttgcctt gcctttccac cccctaattg tcaaccacaa
14761 aaatgagaaa ttcctcttct agctcagcct tgagtccatt gccaaatttt cagcacacct
14821 gccagcaact tgggggaata agcgaaggtt tccctacaag agggaaagaa ggcaaaaacg
14881 gcacagctat ctccaaacac atctgagttc atttcaaaag tgaccaaggg aatctccgca
14941 caaaagtgca gattgaggaa ttgtgatggg tcattcccaa gaatccccca aggggcatcc
15001 caaatccctg aggagtaaca gctgcaaacc tggtcagttc tcagtgagag ccagctcact
15061 tatagctttg ctgctagaac ctgttgtggc tgcatttcct ggtggccagt gacaactgtg
15121 taaccagaat agctgcatgg cgctgaccct ttggccggaa cttggtctct tggctccctc
15181 cttggccacc caccacctct cgcacagccc ctctgttttt acaccaataa caagaattaa
15241 gggggaagcc ctggcagcta tacgttttca accagactcc tttgccggga cccagcccgc
15301 caccctgctc gcctccgtca aacccccggc caatgcagtg agcaccatgt agctcccttg
15361 atttaaaaaa aataaaaaat aaaaaaaaaa ggaaaaaaaa atacaacaca cacacaaaaa
15421 taaaaaaaat attctaatga atgtatcttt ctaaaggact gacgttcaat caaatatctg
15481 aaaatactaa aggtcaaaac cttgtcagat gttaacttct aagttcggtt tgggattttt
15541 tttttttaat agaaatcaag ttgtttttgt ttttaaggaa aagcgggtca ttgcaaaggg
15601 ctgggtgtaa ttttatgttt catttccttc attttaaagc aatacaaggt tatggagcag
15661 atggttttgt gccgaatcat gaatactagt caagtcacac actctggaaa cttgcaactt
15721 tttgtttgtt ttggttttca aataaatata aatatgatat atataggaac taatatagta
15781 atgcaccatg taacaaagcc tagttcagtc catggctttt aattctctta acactataga
15841 taaggattgt gttacagttg ctagtagcgg caggaagatg tcaggctcac tttcctctga
15901 ttcccgaaat ggggggaacc tctaaccata aaggaatggt agaacagtcc attcctcgga
15961 tcagagaaaa atgcagacat ggtgtcacct ggattttttt ctgcccatga atgttgccag
16021 tcagtacctg tcctccttgt ttctctattt ttggttatga atgttggggt taccacctgc
16081 atttagggga aaattgtgtt ctgtgctttc ctggtatctt gttccgaggt actctagttc
16141 tgtctttcaa ccaagaaaat agaattgtgg tgtttctttt attgaacttt taacagtctc
16201 tttagtaaat acaggtagtt gaataattgt ttcaagagct caacagatga caagcttctt
16261 ttctagaaat aagacatttt ttgacaactt tatcatgtat aacagatctg ttttttttcc
16321 ttgtgttctt ccaagcttct ggttagagaa aaagagaaaa aaaaaaaagg aaaatgtgtc
16381 taaagtccat cagtgttaac tccctgtgac agggatgaag gaaaatactt taatagttca
16441 aaaaataata atgctgaaag ctctctacga aagactgaat gtaaaagtaa aaagtgtaca
16501 tagttgtaaa aaaaaggagt ttttaaacat gtttattttc tatgcacttt tttttattta
16561 agtgatagtt taattaataa acatgtcaag tttaaaaaaa aaaaaaaa
KMT2D (accession No. XM_006719616):
(SEQ ID NO: 134)
        1 agcggaagga tcccgcagcg tgtgcgtaga actgcagagt cacagccttt cctccgagag
      61 ggcgggatcc ctccgccgct ccgctccaac acaaaatagg gccgcctctt ctcctttctc
    121 cccctctcga gtggggtgcc ccgggcaaaa ggcccccccg gatctagcgc cgaaggcttc
    181 acgaatcttc acgaccgctg cccagctctt gggccaggaa atagcccctt cgcaggaacc
    241 accctaccgg ccgaacagga ggcggagggg gggaggcgga gcggcgccgc gctgcactac
    301 tttcctctcc ggttgcaaat ggctgcctcg ttccccactt tccgctcagt ttcctgaccc
    361 cccggtgccg ggagccgggg ttgggccatg cacctctagg ccgcctgcga tcacagtcag
    421 ccgggggtcg agggggtgcc accgaccaga gccggccagg ccgggggcgg ggcagctccc
    481 gaggccagag gggaagggag gcgagcgcag ggcctggagc ggccggaggg gagcgggcag
    541 agggctcgca ccgcccgccc cttccttttc ctcgcctacc tagcctcctc ccttccccgg
    601 ggggagcaga aggtgggggg ctcgaagccg ccgagggtga gcgctcgggg tcgagaagcc
    661 cggcgctggg tgtgtgtcag gttcagcccc gcggccccgc cggccccgcg tcgccgtagc
    721 tcgcgcggcc ccgggcgccg gccggggcgg ggagaggggc tcggcgctcc tgcgagggtc
    781 tcacgttcca tccgggccag gcgcggggcg gcgcggcatt ccttccgggc tgctggggag
    841 gcgcctcgac gttccatctg gagagcctcg acgttccgcc cgagcccggc gcgggcggcc
    901 ggggcgctgg ccgggcccta ggactgagag gccgcccggc gacgcggatg cggagcctgc
    961 tcgcccaaga tcaaagccac cggtgctctc tttgtgtccg ctcgggattc gccgccctgg
  1021 ggctgtccat ggaaacctaa actgctggaa cctgaggcag agaacccctc tttggcttct
  1081 tgctgttttt ttgtgggggg agggtggcca ctccgacctg gatttaccgt tcttggcccc
  1141 cctaagcccc cccgtgcggg gggcggctgt gatcgctctg gcggttggag gtcggggagc
  1201 ggcccgggct ctggccatgt tctcggatga ggatttctgg atcgccctgt gaagaggtct
  1261 ccccgagagg gccctgccca gtcggagaga gggatggaca gccagaagct ggctggtgag
  1321 gataaagatt cagaaccggc agctgatgga cctgcagctt ctgaggaccc aagtgccact
  1381 gagtcagacc tgcccaaccc acatgtggga gaggtctctg tccttagttc tgggagtccc
  1441 aggcttcagg agactcctca ggactgcagt gggggtccgg tgcggcgttg tgctctctgt
  1501 aactgcgggg agcccagtct acacgggcag cgggagctac ggcgctttga gttgccattt
  1561 gattggcccc ggtgtccagt ggtgtcccct ggggggagcc cagggcccaa tgaggcagtg
  1621 ctgcccagtg aggacctatc acagattggt ttccctgagg gccttacacc tgcccaccta
  1681 ggagaacctg gagggtcctg ctgggctcac cattggtgtg ctgcatggtc ggcaggcgta
  1741 tgggggcagg agggcccaga actatgtggt gtggacaagg ccatcttctc agggatctca
  1801 cagcgctgct cccactgcac caggctcggt gcctccatcc cttgccgctc acctggatgt
  1861 ccacggcttt accacttccc ctgcgcgact gccagcggtt ccttcctatc catgaaaaca
  1921 ctgcagctgc tatgcccaga gcacagtgag ggggctgcat atctggagga ggctcgctgt
  1981 gcagtgtgtg aggggccagg ggagttgtgt gacctgttct tctgtaccag ctgtgggcat
  2041 cactatcacg gggcctgcct ggacactgct ctgactgccc gcaaacgtgc tggctggcag
  2101 tgccctgaat gcaaagtgtg ccaagcctgc aggaaacctg ggaatgactc taagatgttg
  2161 gtttgtgaga cgtgtgacaa aggataccat actttctgcc taaaaccacc catggaggaa
  2221 ctgcctgctc actcttggaa gtgcaaggcg tgccgggtgt gccgggcctg tggggcgggc
  2281 tcagcagaac tgaatcccaa ctcggagtgg tttgagaact actctctctg tcaccgctgt
  2341 cacaaagccc agggaggtca gactatccgc tccgttgctg agcagcatac cccggtgtgt
  2401 agcagatttt cacccccaga gcctggcgat acccccactg acgagcccga tgctctgtac
  2461 gttgcatgcc aagggcagcc aaagggtggg cacgtgacct ctatgcaacc caaggaacca
  2521 gggcccctgc aatgtgaagc caaaccacta gggaaagcag gggtccaact tgagccccag
  2581 ttggaggccc ccctaaacga ggagatgcca ctgctgcccc cacctgagga gtcacccctg
  2641 tccccaccac ctgaggaatc acccacgtcc ccaccacctg aggcatcacg cctgtcacca
  2701 ccacctgagg aattgcccgc atccccactt cctgaggcat tgcacctgtc ccggccgctg
  2761 gaggaatcgc ccctctctcc gccgcctgag gagtctcctc tgtctccccc acctgaatca
  2821 tcaccttttt ctccactgga ggagtcgccc ttgtctccac cggaagagtc acccccatct
  2881 cctgcacttg agacgcctct atccccacca cctgaagcat cgcccctgtc cccaccattt
  2941 gaagaatctc ctttgtcccc gccacctgag gaattgccca cttccccgcc acctgaagca
  3001 tctcgcctgt ctccaccacc tgaggagtca cccatgtccc ctccacctga agagtcaccc
  3061 atgtctccac caccggaggc atctcgtctg ttcccaccat ttgaagagtc tcctctgtcc
  3121 cctccacctg aggagtctcc cctttcccca ccacctgagg catcacgcct gtccccacca
  3181 cctgaggact cgcctatgtc cccaccacct gaagaatcac ctatgtcccc cccacctgag
  3241 gtatcgcgcc tatcccccct gcctgtggtg tcacgcctgt ctccaccgcc tgaggaatct
  3301 cccttgtccc caccgcctga ggagtctccc acgtcccctc cacctgaggc ttcacgcctc
  3361 tccccaccac ctgaggactc ccccacatcc ccaccacctg aggactcacc tgcttcccca
  3421 ccaccggagg actcgctcat gtccctgccg ctggaggagt cacccctgtt gccactacct
  3481 gaggagccgc aactctgccc ccggtccgag gggccgcacc tgtcaccccg gcctgaggag
  3541 ccgcacctgt ccccccggcc tgaggagcca cacctatctc cgcaggctga ggagccacac
  3601 ctgtcccccc agcctgagga gccatgccta tgcgctgtgc ctgaggagcc acacttgtcc
  3661 ccccaggctg agggaccaca tctgtcccct cagcctgagg aattgcacct gtccccccag
  3721 actgaggagc cgcacctgtc tcctgtgcct gaggagccat gcttgtcccc ccaacctgag
  3781 gaatcacacc tgtcccccca gtctgaggag ccatgcctgt ccccccggcc tgaggaatcg
  3841 catctgtccc ctgagcttga gaagccaccc ctgtcccctc ggcctgaaaa gccccctgag
  3901 gagccaggcc aatgccctgc acctgaggag ctgcccttgt tccctccccc tggggaacca
  3961 tccttatctc ccttgcttgg agagccagcc ctgtctgagc ctggggaacc acctctgtcc
  4021 cctctgcccg aggagctgcc gttgtcccca tctggggagc catccttgtc gcctcagctg
  4081 atgccaccag atccccttcc tcctccactc tcacccatca tcacagctgc ggccccaccg
  4141 gccctgtctc ctttggggga gttagagtac ccctttggtg ccaaagggga cagtgaccct
  4201 gagtcaccgt tggctgcccc catcctggag acacccatca gccctccacc agaagctaac
  4261 tgcactgacc ctgagcctgt cccccctatg atccttcccc catctccagg ctccccagtg
  4321 gggccggctt ctcccatcct gatggagccc cttcctcctc agtgttcgcc actccttcag
  4381 cattccctgg ttccccaaaa ctcccctcct tcccagtgct ctcctcctgc cctaccactg
  4441 tccgttccct ccccgttgag tcccataggg aaggtagtgg gggtctcaga tgaggctgag
  4501 ctgcacgaga tggagactga gaaagtttca gaacctgaat gcccagcctt ggaacccagt
  4561 gccaccagtc ctctcccttc cccaatgggg gacctttcct gccccgcccc cagccctgcc
  4621 ccagccctgg atgacttctc tggcctaggg gaagacacag cccctctgga tgggattgat
  4681 gctccgggtt cacagccaga gcctggacag acccctggca gtttggctag tgaacttaaa
  4741 ggctcccctg tgctcctgga ccccgaggag ctggcccctg tgacccctat ggaggtctac
  4801 cccgaatgca agcagacagc agggcagggc tcaccatgtg aagaacagga agagccacgt
  4861 gcaccggtgg cccccacacc acccactctc atcaaatccg acatcgttaa cgagatctct
  4921 aatctgagcc agggtgatgc cagtgccagt tttcctggct cagagcccct cctgggctct
  4981 ccagacccgg aggggggtgg ctccctgtcc atggagttgg gggtctctac ggatgttagt
  5041 ccagcccgag atgagggctc cctacggctc tgtactgact cactgccaga gactgatgac
  5101 tcactattgt gcgatgctgg gacagctatc agcggaggca aagctgaggg ggagaagggg
  5161 cggcggcgca gctccccagc ccgttcccgc atcaaacagg gtcgcagcag cagtttccca
  5221 ggaagacgcc ggcctcgtgg aggagcccat ggaggacgtg gtagaggacg ggcccggcta
  5281 aagtcaactg cttcttccat tgagactctg gttgctgaca ttgatagctc tcccagtaag
  5341 gaggaggagg aagaagatga tgacaccatg cagaataccg tggttctctt ctccaacaca
  5401 gacaaatttg tcctaatgca ggacatgtgt gtggtatgtg gcagctttgg ccggggggca
  5461 gagggccacc tccttgcctg ttcgcagtgc tctcagtgct atcaccctta ctgtgtcaac
  5521 agcaagatca ccaaggtgat gctgctcaag ggctggcgtt gtgtggagtg tattgtgtgt
  5581 gaggtgtgtg gccaggcctc cgacccctca cgcctgctgc tctgtgatga ctgtgatatt
  5641 agctaccaca catactgcct ggacccccca ctgctcaccg tccccaaggg cggctggaag
  5701 tgcaagtggt gtgtgtcctg tatgcagtgt ggggctgctt cccctggctt ccactgtgaa
  5761 tggcagaata gttacacaca ctgtgggccc tgtgccagcc tggtgacctg ccctatctgt
  5821 catgctcctt acgtagaaga ggacctacta atccagtgcc gccactgtga acggtggatg
  5881 catgcaggct gtgagagcct cttcacagag gacgatgtgg agcaggcagc cgatgaaggc
  5941 tttgactgtg tctcctgcca gccctacgtg gtaaagcctg tggcgcctgt tgcacctcca
  6001 gagctggtgc ccatgaaggt gaaagagcca gagccccagt actttcgctt cgaaggtgtg
  6061 tggctgacag aaactggcat ggccttgctg cgtaacctga ccatgtcacc actgcacaag
  6121 cggcgccaac ggcgaggacg gcttggcctc ccaggcgagg caggattgga gggttctgag
  6181 ccctcagatg cccttggccc tgatgacaag aaggatgggg acctggacac cgatgagctg
  6241 ctcaagggtg aaggtggtgt ggagcacatg gagtgcgaaa ttaaactgga gggccccgtc
  6301 agccctgatg tggagcctgg caaagaggag accgaggaaa gcaaaaaacg caagcgtaaa
  6361 ccatatcggc ctggcattgg tggtttcatg gtgcgacagc ggaaatccca cacacgcacg
  6421 aaaaaggggc ctgctgcaca ggcggaggtg ttgagtgggg atgggcagcc cgacgaggtg
  6481 atacctgctg acctgcctgc agagggcgcc gtggagcaga gcttagctga aggggatgag
  6541 aagaagaagc aacagcggcg agggcgcaag aagagcaaac tggaggacat gttccctgct
  6601 tacttgcagg aagccttctt tgggaaggag ctgctggacc tgagccgtaa ggcccttttt
  6661 gcagttgggg tgggccggcc aagctttgga ctagggaccc caaaagccaa gggagatgga
  6721 ggctcagaaa ggaaggaact ccccacatcg cagaaaggag atgatggtcc agatattgca
  6781 gatgaagaat cccgtggcct cgagggcaaa gccgatacac caggacctga ggatgggggc
  6841 gtgaaggcat ccccagtgcc cagtgaccct gagaagccag gcaccccagg tgaagggatg
  6901 cttagctctg acttagacag gatttccaca gaagaactgc ccaagatgga atccaaggac
  6961 ctgcagcagc tcttcaagga tgttctgggc tctgaacgag aacagcatct gggttgtgga
  7021 acccctggcc tagaaggcag ccgtacgcca ctgcagaggc cctttcttca aggtggactc
  7081 cctttgggca atctgccctc cagcagccca atggactcct acccaggcct ctgccagtcc
  7141 ccgttcctgg attctaggga gcgcgggggc ttctttagcc cggaacccgg tgagcccgac
  7201 agcccctgga cgggctcagg tggcaccacg ccctccaccc ccacaacccc caccacggag
  7261 ggtgagggcg acggactctc ctataaccag cggagtcttc agcgctggga gaaggatgag
  7321 gagttgggcc agctgtccac catctcacct gtgctctatg ccaacattaa ttttcctaat
  7381 ctcaagcaag actacccaga ctggtcaagc cgttgcaaac aaatcatgaa gctctggaga
  7441 aaggttccag cagctgacaa agccccctac ctgcaaaagg ccaaagataa ccgggcagct
  7501 caccgcatca acaaggtgca gaagcaggct gagagccaga tcaacaagca gaccaaggtg
  7561 ggcgacatag cccgtaagac tgaccgaccg gccctacatc tccgcattcc cccgcagcca
  7621 ggggcactgg gcagcccgcc ccccgctgct gcccccacca ttttcattgg cagccccact
  7681 acccccgccg gcttgtctac ctctgcggac gggttcctga agccgccggc gggctcggtg
  7741 cctggccctg actcgcctgg tgagctcttc ctcaagctcc caccccaggt gcccgcccaa
  7801 gtgccttcgc aggacccctt tggactggcc cctgcctatc ccctggagcc ccgcttcccc
  7861 acggcaccgc ccacctatcc cccctatcct agtcctacgg gggcccctgc gcagcccccg
  7921 atgctgggcg cctcatctcg tcctggggct ggccagccag gggaattcca cactacccca
  7981 cctggcaccc ccagacacca gccctccaca cctgacccat tcctcaaacc ccgctgcccc
  8041 tcgctggata acttggctgt gcctgagagc cctggggtag ggggaggcaa agcttccgag
  8101 cccctgctct cgcccccacc ttttggggag tcccggaagg ccctagaggt gaagaaggaa
  8161 gagcttgggg catcctctcc tagctatggg cccccaaacc tgggctttgt tgactcaccc
  8221 tcctcaggca cccacctggg tggcctggag ttaaagacac ctgatgtctt caaagccccc
  8281 ctgacccctc gggcatctca ggtagagccc cagagcccgg gcttgggcct aaggccccag
  8341 gagccacccc ctgcccaggc tttggcacct tctcctccaa gtcacccaga catctttcgc
  8401 cctggctcct acactgaccc atatgctcag cccccattga ctcctcggcc ccaacctccg
  8461 ccccctgaga gctgctgtgc tctgccccct cgctcactgc cctccgaccc tttctcccga
  8521 gtgcctgcca gtcctcagtc ccagtccagc tcccagtctc cactgacacc ccggcctctg
  8581 tctgctgaag ctttttgccc atcacccgtt acccctcgct tccagtcccc tgacccttat
  8641 tctcgcccac cctcacgccc tcagtcccgt gacccatttg ccccattgca taagccaccc
  8701 cgaccccagc cccctgaagt tgcctttaag gctgggtctc tagcccacac ttcgctgggg
  8761 gctggggggt tcccagcagc cctgcccgcg gggccagcag gtgagctcca tgccaaggtc
  8821 ccaagtgggc agccccccaa ttttgtccgg tcccctggga cgggtgcatt tgtgggcacc
  8881 ccctctccca tgcgtttcac tttccctcag gcagtagggg agccttccct aaagccccct
  8941 gtccctcagc ctggtctccc gccaccccat gggatcaaca gccattttgg gcccggcccc
  9001 accttgggca agcctcaaag cacaaactac acagtagcca cagggaactt ccacccatcg
  9061 ggcagccccc tggggcccag cagcgggtcc acaggggaga gctatgggct gtccccacta
  9121 cgccctccgt cggttctgcc accacctgca cccgacggat ccctccccta cctgtcccat
  9181 ggagcctcac agcgatcagg catcacctct cctgtcgaaa agcgagaaga cccagggact
  9241 ggaatgggta gctctttggc gacagctgaa ctcccaggta cccaggaccc aggcatgtcc
  9301 ggccttagcc aaacagagct ggagaagcaa cggcagcgcc agcgactacg agagctgctg
  9361 attcggcagc agatccagcg caacaccctg cggcaggaga aggaaacagc tgcagcagct
  9421 gcaggagcag tggggcctcc aggcagctgg ggtgctgagc ccagcagccc tgcctttgag
  9481 cagctgagtc gaggccagac cccctttgct gggacacagg acaagagcag ccttgtgggg
  9541 ttgcccccaa gcaagctgag tggccccatc ctggggccag ggtccttccc tagcgatgac
  9601 cgactctccc ggccacctcc accagccacg ccttcctcta tggatgtgaa cagccggcaa
  9661 ctggtaggag gctcccaagc tttctatcag cgagcaccct atcctgggtc cctgccctta
  9721 cagcagcaac agcaacaact gtggcagcaa caacaggcaa cagcagcaac ctccatgcga
  9781 tttgccatgt cagctcgctt tccatcaact cctggacctg aacttggccg ccaagcccta
  9841 ggttccccgt tggcgggaat ttccacccgt ctgccaggcc ctggtgagcc agtgcctggt
  9901 ccagctggtc ctgcccagtt cattgagctg cggcacaatg tacagaaagg actgggacct
  9961 gggggcactc cgtttcctgg tcagggccca cctcagagac cccgttttta ccctgtaagt
10021 gaggaccccc accgactggc tcctgaaggg cttcggggcc tggcggtatc aggtcttccc
10081 ccacagaaac cctcagcccc accggcccct gaattgaaca acagtcttca tccaacaccc
10141 cacaccaagg gtcctaccct gccaactggt ttggagctgg tcaaccggcc cccgtcgagc
10201 actgagcttg gccgccccaa tcctctggcc ctggaagctg ggaagttgcc ctgtgaggat
10261 cccgagctgg atgacgattt tgatgcccac aaggccctag aggatgatga agagcttgct
10321 cacctgggtc tgggtgtgga tgtggccaag ggtgatgatg aacttggcac cttagaaaac
10381 ctggagacca atgaccccca cttggatgac ctgctcaatg gagacgagtt tgacctgctg
10441 gcatatactg atcctgagct ggacactggg gacaagaagg atatcttcaa tgagcacctg
10501 aggctggtag aatcggctaa tgagaaggct gaacgggagg ccctgctgcg gggggtggag
10561 ccaggaccct tgggccctga ggagcgccct ccccctgctg ctgatgcctc tgaaccccgc
10621 ctggcatctg tgctccctga ggtgaagccc aaggtggagg agggtggacg ccacccttct
10681 ccttgccaat tcaccattgc tacccccaag gtagagcccg cacctgctgc caattccctt
10741 ggcctggggc taaagccagg acagagcatg atgggcagcc gggatacccg gatgggcaca
10801 gggccatttt ctagcagtgg gcacacagct gagaaggcct cctttggggc cacgggagga
10861 ccaccagctc acctgctgac ccccagccca ctgagtggcc caggaggatc ctccctgctg
10921 gaaaagtttg agctcgagag tggggctttg accttgcctg gtggacctgc agcatctggg
10981 gatgagctag acaagatgga gagctcactg gtagccagcg agttacccct gctcattgag
11041 gacctgttgg agcatgagaa gaaggagctg cagaagaagc agcagctttc agcacagttg
11101 cagcctgccc agcagcagca gcaacagcag cagcagcatt ccctactgtc tgcaccaggc
11161 cctgcccagg ccatgtcttt gccacatgag ggctcttctc ccagtttggc tgggtcccaa
11221 cagcagcttt ccctgggtct tgcaggtgcc cgacagccag gtttgcccca gccactgatg
11281 cccacccagc caccagctca tgccctccag caacgcctgg ctccatccat ggctatggtg
11341 tccaatcaag ggcatatgct aagtgggcag catggagggc aggcaggctt ggtaccccag
11401 cagagctcac agccagtgct atcacagaag cccatgggca ccatgccacc ttccatgtgc
11461 atgaagccgc agcaattggc aatgcagcag cagctggcaa acagcttctt cccagataca
11521 gacctggaca aatttgctgc agaagatatc attgatccca ttgcaaaggc caagatggtg
11581 gctttgaaag gcatcaagaa agtgatggct cagggcagca ttggggtggc acctggtatg
11641 aacagacagc aagtgtctct gctagcccag aggctctcgg ggggacctag cagtgatctg
11701 cagaaccatg tggcagctgg gagtggccag gagcggagtg ctggtgatcc ctcccagcct
11761 cgtcccaacc cgcccacttt tgctcaggga gtgatcaatg aagctgacca gcggcagtat
11821 gaggagtggc tgttccatac ccagcagctc ctacagatgc agctgaaggt gctagaggag
11881 cagattggtg tacaccgcaa gtcccggaag gctctgtgtg ccaagcagcg cactgccaaa
11941 aaagctggcc gtgagttccc agaagctgat gctgagaagc tcaagctggt tacagagcag
12001 cagagcaaga tccagaaaca actggatcag gtccggaaac agcagaagga gcacactaat
12061 ctcatggcag aatatcggaa caagcagcag caacaacagc agcagcagca gcaacaacag
12121 caacagcact cagctgtgct ggctctcagc ccttcccaga gtccccggct gctcaccaag
12181 ctccctggtc agctgctccc tggccatggg ctgcagccac cacaggggcc tccgggggg
12241 caagccggag gtcttcgcct gacccctggg ggtatggcac tacctggaca gcctggtggc
12301 cccttcctta atacagctct ggcccaacag cagcaacagc aacattctgg tggggctgga
12361 tccctggctg gcccttcagg gggcttcttc cctggcaacc ttgctcttcg aagcctcgga
12421 cctgattcaa ggcttttaca ggaaaggcag ctgcagctgc agcagcaacg tatgcagctg
12481 gcccagaaac tgcagcagca gcagcagcag caacagcagc agcagcacct tctaggacag
12541 gtggcaatcc agcagcaaca gcagcagggt cctggagtac agacaaacca agctctgggt
12601 cccaagcccc agggccttat gcctcccagc agccaccaag gcctcctggt ccagcagctg
12661 tcccctcaac caccccaggg gccccagggc atgctgggcc ctgcccaggt ggctgtgttg
12721 cagcagcagc accctggagc tttgggcccc cagggccctc acagacaggt gcttatgacc
12781 cagtcccggg tgctcagttc cccccagctg gcacagcagg gtcagggcct tatgggacac
12841 aggctggtca cagcccagca gcagcagcag caacaacagc accaacagca agggtccatg
12901 gcagggctgt cccatcttca gcagagtctg atgtcacaca gtgggcagcc caaactgagc
12961 gctcagccca tgggctcttt acagcagctt cagcagcagc agcagctgca acagcaacag
13021 caacttcagc agcagcagca gcagcagcta caacagcaac agcaacttca gcagcaacag
13081 cttcaacagc agcaacagca gcagcagctt caacaacagc agcagcaaca gcttcaacag
13141 cagcaacagc agctacaaca gcaacagcaa caacaacagc agcagtttca acagcagcag
13201 caacagcagc agatgggcct tttaaaccag agtcgaactt tactgtctcc tcagcaacaa
13261 cagcagcagc aagtggcact tggccctggc atgccagcaa agcctcttca acacttttct
13321 agccctggag ccctgggtcc aaccctcctc ctgacgggca aggaacaaaa caccgtagac
13381 ccagccgttt cttcagaggc cactgagggg ccctctacac atcagggagg gccgttagca
13441 ataggaacta cccctgagtc aatggccact gaaccaggag aggtaaagcc ctcactctct
13501 ggggactcac aactcctgct tgtccaaccc cagccccagc ctcagcccag ctctctgcag
13561 ctgcagccac ctctgaggct tccaggacaa cagcagcagc aagttagcct gctccacaca
13621 gcaggtggag gaagccatgg gcagctaggc agtggatcat cttctgaggc ctcatctgtg
13681 ccccacctgc tggctcagcc ctctgtttcc ttaggggatc agcctgggtc catgacccag
13741 aaccttctgg gcccccaaca gcccatgcta gagcggccca tgcaaaataa tacagggcca
13801 caacctccca aaccaggacc tgtcctccag tctgggcagg gtctgcctgg ggttggaatc
13861 atgcctacgg tgggtcagct tcgagcacag ctccaaggag tcctggccaa aaacccacag
13921 ctgcggcact taagtcctca gcagcagcag cagctacagg cactcctcat gcagcggcag
13981 ctgcagcaga gtcaggcagt acgccagacc ccaccctacc aggagcctgg gacccagacc
14041 tctcccctcc agggcctcct gggctgccaa cctcaacttg ggggcttccc tggaccacag
14101 acaggccccc tccaggagct aggggcaggg cctcgacctc agggcccacc ccggctccct
14161 gccccaccag gagccttatc tacaggacca gtccttggcc ctgtccatcc cacacctcca
14221 ccatccagcc ctcaagagcc aaagagacct tcacaattac cttcccccag ctcccagctt
14281 cccactgagg cccagctccc tcccacccat ccagggaccc ccaaacctca ggggccaacc
14341 ttggagccgc ctcctgggag ggtctcacct gctgctgccc agcttgcaga taccttgttt
14401 agcaagggtc tgggaccttg ggatccccca gacaacctag cagaaaccca gaagccagag
14461 cagagcagcc tggtacctgg gcatctggac caggtgaatg gacaggtggt gcctgaggca
14521 tcccaactca gcatcaagca ggaacctcgg gaagagccat gtgccctggg agcccagtca
14581 gtgaagaggg aggccaatgg ggagccaata ggggcaccag gaaccagcaa ccacctcctg
14641 ctggcaggcc ctcgctcaga agctgggcat ctgctcttgc agaagctact ccgggcaaag
14701 aatgtgcaac tcagcactgg gcgggggtcc gaggggctgc gagctgagat caacgggcac
14761 attgacagca agctggctgg gctggagcag aaactacagg gtacccccag caacaaggag
14821 gatgcagcag caaggaagcc tttgacaccg aagcccaagc gggtacagaa ggcaagcgac
14881 aggttggtga gctcccgaaa gaagctgcgg aaggaggacg gggtcagggc cagcgaggcc
14941 ttgctgaaac agctgaaaca ggagctgtcc ctgctgcccc taacggagcc tgctatcacc
15001 gccaatttta gcctctttgc cccctttggc agtggctgcc cagtcaatgg gcagagccag
15061 ctgagggggg cctttggaag tggggcgctg cccactggcc ctgactacta ttcccagctg
15121 cttaccaaga ataacctgag taacccgccg acaccaccct cgtcgctgcc ccccacccca
15181 cccccatcgg tgcagcagaa gatggtgaat ggcgtcaccc catctgaaga gctgggggag
15241 caccccaagg atgctgcctc tgcccgggat agtgaaaggg cactgaggga tacttcagag
15301 gtgaagagtc tagacctgct ggctgccttg cctacacccc ctcacaatca gactgaggat
15361 gtcaggatgg agagtgatga ggatagcgat tctcctgaca gcattgtgcc agcttcatcc
15421 cctgagagca tcttggggga ggaggcccct cgtttccctc atctgggctc aggccggtgg
15481 gagcaagagg accgggccct ctcccctgtc atccccctca ttcctcgggc cagcatccca
15541 gtcttcccag ataccaaacc ttatggggcc cttggcctgg aggtccctgg aaagctgcct
15601 gtcacaactt gggaaaaggg caaaggaagt gaggtgtcag tcatgctcac agtctctgct
15661 gctgcagcca agaacctgaa tggcgtgatg gtggcagtgg cggagctgct gagcatgaag
15721 atccccaact cctatgaggt gctgttccca gagagcccc cccgggcagg cactgagcca
15781 aagaaggggg aagctgaggg tcctggtggg aaggaaaagg gtctggaagg caagagccca
15841 gacactggcc ctgattggct gaagcagttt gatgcagtgt tgcctggcta taccctgaag
15901 agccaactag acatcttgag cctcctgaaa caggagagcc ccgccccaga gccacccact
15961 cagcacagct atacctacaa tgtctccaat ctggatgtgc gacagctctc ggccccacct
16021 cctgaagaac cctccccgcc cccttccccc ttggcacctt ctcctgccag tccccctact
16081 gagcccttgg ttgaacttcc caccgaaccc ttggctgagc cacccgtccc ctcacctctg
16141 ccactggcct catcccctga atcagcccga cccaagcccc gtgcccggcc ccctgaagaa
16201 ggtgaagatt cccgtcctcc tcgcctcaag aaatggaaag gagtgcgctg gaagcggctt
16261 cggctgctgc tgaccatcca gaagggcagt gggcggcagg aggatgagcg ggaagtggca
16321 gagtttatgg agcagcttgg cacagccttg cgacctgaca aggtaccgcg agacatgcgt
16381 cgctgctgtt tctgtcatga ggagggtgac ggggccactg atgggcctgc ccgtctgctg
16441 aacctggacc tggacctgtg ggtgcacctc aactgtgccc tttggtccac ggaggtgtat
16501 gagacccagg gcggggcact gatgaatgtg gaggttgccc tgcaccgagg actgctaacc
16561 aagtgctccc tgtgccagcg aactggtgcc accagcagct gcaatcgcat gcgttgcccc
16621 aatgtctacc attttgcttg tgccatccgt gccaagtgca tgttcttcaa ggacaagacc
16681 atgctgtgtc caatgcataa gatcaagggg ccctgtgagc aagagctgag ctcttttgct
16741 gtcttccgg gggtctacat tgagcgggac gaggtgaagc aaatcgctag catcattcag
16801 cggggagaac ggctgcacat gttccgtgtg gggggccttg tgttccacgc catcggacag
16861 ctgctgcctc accagatggc tgactttcat agtgccactg ccctctatcc cgtgggctac
16921 gaggccacgc gcatctattg gagcctccgc accaacaatc gtcgctgctg ctatcgctgt
16981 tctattggtg agaacaacgg gcggccggag tttgtaatca aagtcatcga gcagggcctg
17041 gaggacctgg tcttcactga cgcctctccc caggccgtgt ggaatcgcat cattgagcct
17101 gtggctgcca tgagaaaaga ggctgacatg ctgcgactct tccctgagta tctgaagggc
17161 gaggagctct ttgggctgac ggtgcatgcc gtgcttcgca tagctgaatc actgcccggg
17221 gtggagagct gtcaaaacta tttattccgc tatgggcgcc acccccttat ggagctgcca
17281 ctcatgatca accccactgg ctgtgcccga tcagagccta aaatcctcac acactacaaa
17341 cggccccata ccctgaacag caccagcatg tctaaggcat atcagagcac cttcacaggc
17401 gagaccaaca ccccctacag caagcagttt gtgcactcca agtcatctca gtaccggcgg
17461 ctgcgcaccg aatggaagaa caacgtgtac ctggctcgct cccgtatcca gggcctgggg
17521 ctctatgcag ccaaggacct agaaaagcac acaatggtta tcgagtacat tggcaccatc
17581 attcggaacg aggtggccaa ccggcgggag aaaatctacg aagagcagaa tcgaggcatc
17641 tacatgttcc gaataaacaa tgaacatgtg attgatgcta cgttgaccgg cggccctgcc
17701 aggtacatta accattcctg tgcccctaac tgtgtggccg aagtcgtgac atttgacaaa
17761 gaggacaaaa tcatcatcat ctccagccgg cgaatcccca aaggagagga gctaacctat
17821 gactatcagt ttgattttga ggacgatcag cacaagatcc cctgccactg tggagcctgg
17881 aattgtcgga aatggatgaa ctaagaagct ttgaggctac caggcagggg agtcccccta
17941 cccacaacct cttccctgaa agggatgagg gggaagagag gtagcagcca gagccaggac
18001 ccagggttgg ggctgccggc tgacccggag cccctggagc aggaggctgg ggcagagggc
18061 cctaggccaa gcccaccctg ggcaccaggg acaatcctct tccccaccac cggccctcag
18121 gctggcatct ctgcccccag ctccaggagg ggccagacag aagcagccat tgggcatctc
18181 aggtttgagg gggatatggg ccgggaacta cccagaagca tctgggaggc agcagggtgg
18241 gggaagagga tgtgtggccg ggcctcacag ccctgctgct cccactgacc tctccggccc
18301 aactcacggc tgcaaagaga cttgactaag cttgacaatc ccaaaggccg ggtcccacac
18361 ctggccctgc ctgccgggtc ctgcccccac cctcaccccc atccccctcc ctcttgatct
18421 gtctctgttt ccctcttttc ctctgtgttt ctgtctctct atgggttgtg tttccttgtt
18481 ttccactctg acaaatgcaa catgaacggg aaagaggcgc ccagctgcct aggagggcaa
18541 gctgggcaag ccgggcaagg agaccccgca cccacaccta cctcatttaa gtgttggatt
18601 ttttgctgtt ttgaaatgtg agaccctctc caagccccct actgccccaa ccctctcccc
18661 cacctcactg ccctcttctg agtgggtgga aggggggtag gaggaggaag aaaaacaaca
18721 acaaaaaatc catctttgtt tttaattatg ggcatgggat ggtggttgag gcaaatgatg
18781 atgaagattg gggatgactg gcccctagtt gctctaggac ttccttctcc atctggacat
18841 gggggcagga gggagctaaa cctaggacca ggatatctcc ctcctgtttt cccaacctca
18901 tcatgagcct gtttgccctc cagcccctgg acgggttggg tggggggtag ggtgagggct
18961 atccctgagt ggcatgccca tacctagtga ggcagggtgt ggcccggagc tcccactttc
19021 cctcagtcac caaactgctg ctggtctggt gggaaggggt ggtgatgtgg gggtggggga
19081 gcttagtgtc agcgcgggga gggtgggggg tatttatcta tttatacatg ggattgtaca
19141 tagtcttgtg gggcatgggg gagccggctg gaggtgagaa ccctcccctc tccccccacc
19201 ccccggggag agcaaatgta aaactactaa tttttgtgct ttatatattc tatataaata
19261 tatctatttt ctttttacaa aaccagttta taaatggtag gggggtgtgg ggcggacaca
19321 tggagctccc cttgtggggg ggccccctcc attacccgac ctaccgccct tttcctcacc
19381 ccccacccca ctccccaccc cctggctgtg actgctgtaa gatgggggta tagaggctgg
19441 gcaattccca ccccctgttg tatagttgga ctatgttata acgcacaaaa gagagctgac
19501 cccaggggga gccagagggt gatgggttcc ttgcctccct ttccttcccc tttctgccca
19561 agcttgtgct gcagttgaac ctcttcctgg gggtgggagt aggtaagggg tgggtgaggc
19621 cccaaacccc tctctggtag ggaaccgtgg ggatgaagat gaagcttata tgcagttctc
19681 ttctaggggc tgtgggcaaa gggcattttg taattaatat tttcaagaat cagatgtctg
19741 gagtgtaggg gtgggcttgg tggtggtgga cggggggcc tgctggaggg ggagcttggt
19801 cgctgttgtg attttaggtt tgtttttgtt ttttttgaa tttggggggt tgtggattgt
19861 tgggggtagg gagatttttt ttttttaaag ctgcttcctc aactgtttca agctgcaaat
19921 gtttaagaga ataacagccc ccactcccac aggaaccgct gtaattaaat cagacagtag
19981 gaagactggg ctgctgccct caaagccaca gcccttggat gttccttttc cgagagcaga
20041 aggtctaggc tacagggagg gggagattgg ctcccgtgag tcaggctgtg tttggggctt
20101 gggccctggg attgggaaaa ggggatgggg cagactttgt aagcatatgc taggtatccg
20161 atagtcctgt agaatttagt gaagaaacct tatacagttt ttaattttta tataaactat
20221 aactcagacc caagctacaa ggttggaatt ttggttggtt ttttttttaa gtaccctgcc
20281 tgtataattg catcagaatc ccccacccca ccccccgccc ccgtgtttgt attttgggtt
20341 ggtttacact cgcacatact cagttttcag ttttcccctt tacagtcttc tcccctcacc
20401 tccaggaccc tccccctttt taaaaaataa atcgctgaca agtgtgaatc ccgtgaagac
20461 tttattttgt gttgtgtgta tcctgtacag caaggttggt ccttcgtaac aacggatgaa
20521 atggttccct tttttaaagc gccctctctc cctccaccct cagcgcccct gtccttggca
20581 tgttttgtat cagcgatcat tctgaactgt acatatttat gttgcgagag gcaaagggca
20641 agttttggat tttgcttctt ccaagtttgt ttttaaacga caaataaaaa aagaacattt
20701 taaatacaa
KMT2B (accession No. NM_014727):
(SEQ ID NO: 135)
        1 atggcggcgg cggcgggcgg cggcagttgc cccgggcctg gctccgcgcg gggccgcttc
      61 ccgggccggc cgcggggcgc cggcgggggc gggggccgcg gcggacgggg caacggggcc
    121 gaaagagtgc gggtagctct gcggcgcggc ggtggcgcga cggggccggg cggagccgag
    181 cccggggagg acacggccct gctccgtttg ctggggctcc gccggggcct gcgccggctc
    241 cgccgcctgt gggccggccc ggggtccag cggggccggg gacggggtcg gggccggggc
    301 tggggcccga gtcgaggctg cgtgccggag gaggagagca gtgacgggga atccgacgag
    361 gaggagtttc agggttttca ttcagatgaa gatgtggccc ccagttccct gcgctctgcg
    421 ctccgatccc agcgaggtcg agcgccccga ggtcggggtc gcaagcataa gacgaccccc
    481 cttcctcctc ctcgcctagc agatgtggct cctacccccc caaagacccc tgcccggaaa
    541 cggggtgagg aaggcacaga acggatggtg caggcactga ctgaacttct ccggcgggcc
    601 caggcacccc aagcaccccg gagccgggca tgtgagccct ccaccccccg gcggtctcgg
    661 ggacggcccc caggacggcc agcaggcccc tgcaggagga agcagcaagc agtagtggtg
    721 gcagaagcag ctgtgacaat ccccaaacct gagcccccac ctcctgtggt tccagtgaaa
    781 catcagactg gcagctggaa atgcaaggag gggcccggtc caggacctgg gacccccagg
    841 cgtggaggac agtcaagccg tggaggccgt ggaggcaggg gccgcggccg aggtggtggg
    901 ctcccctttg tgatcaagtt tgtttcaagg gccaaaaaag taaagatggg acaattgtcc
    961 ttgggactcg aatcaggtca aggtcaaggt caacatgagg aaagttggca ggatgtcccc
  1021 caaagaagag ttggatctgg acagggaggg agcccttgct ggaaaaagca ggaacagaag
  1081 ctggatgacg aggaagaaga gaagaaagaa gaagaagaaa aagacaagga gggagaagag
  1141 aaggaagaaa gagctgtagc tgaggagatg atgccagctg cggaaaagga agaggcaaag
  1201 ctgccaccac cgcctctgac tcctccagcc ccttcacctc ctccacccct cccaccccct
  1261 tcgacatctc ctccaccccc actctgccct ccaccaccac ccccagtgtc cccaccacct
  1321 ctaccatccc ctccaccgcc tcctgcccaa gaggagcagg aggaatcccc tcctcctgtg
  1381 gtcccagcta cgtgctccag gaagaggggc cggcctcccc tgactcccag ccagcgggcg
  1441 gagcgggaag ctgctcgggc agggccagag ggcacctctc ctcccactcc aacccccagc
  1501 accgccacgg gaggccctcc ggaagacagt cccaccgtgg cccccaaaag caccaccttc
  1561 ctgaagaata tccggcagtt tattatgcct gtggtgagtg cccgctcctc ccgtgtcatc
  1621 aagacacccc ggcgatttat ggatgaagac ccccccaaac ccccaaaggt ggaggtctca
  1681 cctgtcctgc gacctcccat taccacctcc ccacctgttc cccaggagcc agcaccagtc
  1741 ccctctccac cacgtgcccc aactcctcca tctaccccag ttccactccc tgagaagaga
  1801 cggtccatcc taagggaacc cacatttcgc tggacctcac tgacccggga gctgccccct
  1861 cctcccccag cccctccacc tcccccggcc ccctccccac cccctgctcc tgccacctcc
  1921 tcccggaggc ccctactcct tcgggcccct cagtttaccc caagcgaagc ccacctgaag
  1981 atctacgaat cggtgcttac tcctcctcct cttggggctc ctgaagcccc tgagccagag
  2041 cctcctcctg ccgatgactc tccagctgag cctgagcctc gggcagtggg ccgcaccaac
  2101 cacctcagcc tgcctcgatt cgcccctgtg gtcaccactc ctgttaaggc cgaggtgtcc
  2161 cctcacgggg ctccagctct gagcaacggg ccacagacac aggctcagct actgcagccc
  2221 ctgcaggcct ticaaaccca gctcctgccc caggcactac cgccaccaca gccacagctg
  2281 cagccaccgc cgtcaccaca gcagatgcct cccctggaaa aagcccggat tgcgggcgtg
  2341 ggttccttgc cgctgtctgg ggtagaggag aagatgttca gcctcctcaa gagagccaaa
  2401 gtgcagctat tcaagatcga tcagcagcag cagcagaagg tggcagcttc catgccgctg
  2461 agccctggag ggcagatgga ggaggtggcc ggggctgtca agcagatctc cgacagaggc
  2521 cctgtccggt ctgaagatga gtcggtggaa gctaagagag agcggccctc aggtcccgag
  2581 tcccctgtgc aaggtccccg catcaaacat gtctgccgtc atgctgctgt ggccctgggt
  2641 caggcccggg ccatggtgcc tgaagatgtc cctcgcctca gtgccctccc tctccgggat
  2701 cggcaggacc tcgccacaga ggatacatca tcggcgtccg agactgagag tgtcccgtca
  2761 cggtcccggc ggggaaaggt ggaggcagca ggccctgggg gagaatcaga gcccacaggt
  2821 tctggaggga ccctggccca cacaccccgg cgctcactgc cctcccatca cggcaagaag
  2881 atgcgcatgg ctcgatgtgg acactgtcgg ggctgcctac gtgtgcagga ctgtgggtcc
  2941 tgtgtcaact gcctagacaa gcccaagttt gggggcccta acaccaagaa gcagtgctgt
  3001 gtataccgga agtgtgacaa aatagaggct cggaagatgg aacgactggc taaaaaaggc
  3061 cggacgatag tgaagacgct gttgccctgg gattccgatg aatctcctga ggcctcccct
  3121 ggtcctccag gcccacgccg gggggggga gctggggggc cccgggagga ggtggtggcc
  3181 cacccagggc ccgaggagca ggactccctc ctgcagcgca agtcagctcg gcgctgcgtc
  3241 aaacagcgac cctcctatga tatcttcgag gattcggatg actcggagcc cgggggcccc
  3301 cctgctcctc ggcgtcggac cccccgagaa aatgagctgc cactgccaga acctgaggag
  3361 cagagccggc cccgcaaacc taccctgcag cctgtgttgc agctcaaggc ccgaaggcgc
  3421 ctggacaagg atgctttggc ccctggcccc tttgcttctt ttcccaatgg ctggactgga
  3481 aagcagaagt ctcccgatgg tgtgcaccgc gtccgtgtgg attttaagga ggattgtgat
  3541 ttagagaacg tgtggctgat ggggggcctg agtgtgctca cctctgtgcc agggggcccc
  3601 ccgatggtgt gcttgctgtg tgccagcaaa ggactccacg agctggtgtt ctgtcaagtc
  3661 tgctgtgacc cattccaccc attctgcctg gaggaggccg agcggcccct gccccagcat
  3721 cacgacacct ggtgctgccg tcgctgcaaa ttctgccacg tctgtggacg caaaggtcgt
  3781 ggatccaagc acctcctgga gtgcgagcgc tgccgccatg cataccaccc ggcctgtctg
  3841 gggcccagct atccaacccg ggccacgcgc aaacggcgcc actggatctg ttcagcctgt
  3901 gtgcgctgta agagctgtgg ggcaactcca ggcaagaact gggacgtcga gtggtctgga
  3961 gattacagcc tctgccccag gtgcacccag ctatatgaga aaggaaacta ctgcccgatc
  4021 tgtacacgct gctatgaaga caacgactat gagagcaaga tgatgcagtg cgcacagtgc
  4081 gatcactggg tgcatgccaa gtgcgagggg ctctcagatg aagactacga gatcctttca
  4141 ggactgccag actcggtgct gtacacctgc ggaccgtgtg ctggggcagc gcagccccgc
  4201 tggcgagagg ccctgagcgg ggccctccag gggggcctgc gccaggtgct ccagggcctg
  4261 ctgagctcca aggtggtggg cccactgctg ctctgcaccc agtgtgggcc agatgggaag
  4321 caactgcacc caggaccctg cggcctgcaa gctgtgagtc agcgcttcga ggatggccac
  4381 tacaagtctg tgcacagctt catggaggac atggtgggca tcctcatgcg gcactcggag
  4441 gagggagaga ccccggaccg ccgggctgga ggccagatga aggggctcct gctgaagctg
  4501 ctagaatctg cgttcggctg gttcgacgcc cacgacccca agtactggcg acggagtacc
  4561 cggctgccaa acggagtcct tcccaatgcg gtgttgcccc catccctgga tcatgtctat
  4621 gcgcagtgga gacagcagga accagagacc ccagaatcag ggcagcctcc aggggatccc
  4681 tcagcagcat tccagggcaa ggatccggct gccttctcac acctggagga cccccgtcag
  4741 tgtgcactct gcctcaaata cggggatgca gactccaagg aggcggggcg gctcttgtac
  4801 atcgggcaga acgagtggac acacgtcaac tgtgccatct ggtcggcgga agtcttcgag
  4861 gagaacgacg gctccctcaa gaatgtgcat gctgctgtgg cccgagggag gcagatgcgc
  4921 tgcgagctct gcctgaagcc tggcgccacg gtgggctgct gcctgtcctc ctgcctcagc
  4981 aacttccact tcatgtgtgc ccgggccagc tactgcatct tccaggatga caagaaagtc
  5041 ttctgccaga aacacactga tctcctggat ggcaaggaaa ttgtgaaccc cgatggtttt
  5101 gatgttctcc gccgagtcta tgtggacttc gagggcatca acttcaagcg gaagttcttg
  5161 acggggcttg aacccgatgc catcaacgtg ctcattggtt ccatccgcat tgactccctg
  5221 ggtactctgt ctgatctctc ggactgcgag ggacggctct tccccattgg ctaccagtgc
  5281 tcccgtctgt actggagcac agtggatgct cggaggcgct gctggtatcg gtgccgaatt
  5341 ctggagtatc ggccatgggg gccgagggaa gagccagctc acctggaggc tgcagaggag
  5401 aaccagacca ttgtgcacag ccccgcccct tcctcagagc ccccaggtgg tgaggacccc
  5461 ccactggaca cagatgttct tgtccctgga gctcctgagc gccactcgcc cattcagaac
  5521 ctggaccctc cactgcggcc agattcaggc agcgcccctc ctccagcccc ccgttctttt
  5581 tcgggggctc gaatcaaagt gcccaactac tcgccatccc ggaggccctt ggggggtgtc
  5641 tcctttggcc ccctgccctc ccctggaagt ccatcttcac tgacccacca catccccaca
  5701 gtgggagacc cggacttccc agctcccccc agacgttccc gtcgtcccag ccctttggct
  5761 cccaggccgc ctccatcacg gtgggcctcc cctcctctaa aaacctcccc tcagctcagg
  5821 gtgccccctc ctacctcagt cgtcacagcc ctcacaccta cctcagggga gctggctccc
  5881 cctggcccgg ccccatctcc accaccccct gaagacctgg gcccagactt cgaggacatg
  5941 gaggtggtgt caggactgag tgctgctgac ctggacttcg cggccagcct gctggggact
  6001 gagcccttcc aggaagagat tgtagccgct ggggccatgg ggagcagcca cgggggcccg
  6061 ggggacagct ccgaggagga gtccagcccc acctcccgct acatccactt ccctgtgact
  6121 gtggtgtccg cccctggtct ggcccccagc gctacccctg gagccccccg cattgaacag
  6181 ctggacggcg tggacgacgg cactgacagt gaggctgagg cggtgcagca gcctcggggc
  6241 cagggcacgc ctccttcggg gccaggagta gtccgggcag gggtccttgg ggctgcaggg
  6301 gacagggccc ggcctcctga ggacctgcca tcggaaattg tggattttgt gttgaagaac
  6361 ctagggggtc ctggggatgg aggtgctggc cctagagagg agtcactccc cccggcgcct
  6421 cccctggcta atggcagcca gccctcccaa ggcctgaccg ccagcccagc tgaccccacc
  6481 cgcacatttg cctggctccc aggggcccca ggggtccggg tgttaagcct tggccctgcc
  6541 cctgagcccc ccaaacccgc cacatccaaa atcatacttg tcaacaagct ggggcaagta
  6601 tttgtgaaga tggctgggga gggtgaacct gtcccacccc cagtgaagca gccacctttg
  6661 ccccccacca tttcccccac ggctcccacc tcctggactc tgcccccagg ccccctcctc
  6721 ggcgtgctgc ccgtggtcgg agtggtccgc cctgccccgc ccccgccacc ccctcccctg
  6781 acgctggtgc tgagcagtgg gccagccagc ccgccccgcc aggccatccg cgtcaagagg
  6841 gtgtccactt tctccggccg gtccccgcca gcacctcccc catacaaagc cccccggctg
  6901 gatgaagatg gagaggcctc agaggatacc cctcaggttc cagggcttgg cagtggcggg
  6961 tttagccgtg tgaggatgaa aacccccaca gtgcgtgggg tccttgacct ggatcggcct
  7021 ggggagcccg ctggggaaga aagtcctggg cccctccagg aacggtcccc tttgctgcca
  7081 cttccggaag atggtcctcc ccaggtcccc gatggtcccc cagacctgct gcttgagtcc
  7141 cagtggcacc actattcagg tgaggcttcg agctctgagg aagagcctcc atccccagat
  7201 gataaagaga accaggcccc aaaacggact ggcccacatc tgcgcttcga gatcagcagt
  7261 gaggatgggt tcagcgttga ggcagagagc ttggaggggg cgtggagaac tctgatcgag
  7321 aaagtgcaag aggcccgagg gcatgcccga ctcagacatc tctcctttag tggaatgagt
  7381 ggggcgagac tcctgggcat ccaccatgat gctgtcatct tcctggccga gcagctcccc
  7441 ggagcccagc gttgccagca ctataagttc cgttaccacc agcagggaga gggccaggag
  7501 gagccgcccc tgaatcccca tggggctgct cgggcagagg tctatctccg gaagtgcacc
  7561 tttgacatgt tcaacttcct ggcctcccag caccgggtgc tccctgaggg ggccacctgt
  7621 gatgaggaag aggatgaggt gcagctcagg tcaaccagac gtgccaccag cctggagctg
  7681 cccatggcca tgcgttttcg tcaccttaag aagacgtcca aagaagctgt gggtgtctac
  7741 agatcagcca tccacgggcg aggcctgttc tgtaagcgca acatcgacgc gggggagatg
  7801 gtcatcgagt actctggcat tgtcatccgc tcggtgttga ctgacaagcg ggagaagttc
  7861 tacgatggga agggcatcgg gtgctatatg ttccgcatgg atgactttga tgtagtggac
  7921 gccacgatgc atggcaatgc cgcccgcttc atcaaccact cctgtgagcc caactgcttc
  7981 tctcgggtca tccacgtgga gggccagaaa cacattgtta tcttcgccct gcgccgcatc
  8041 ctgcgtggtg aggagctcac ctacgactac aagttcccca tcgaggatgc cagcaacaag
  8101 ctgccctgca actgtggcgc caagcgctgc cgtcggttcc ttaactgagg ccgtggctgc
  8161 ccaccacgac ccctcacacc tcctgctgcc gtcgctgcca tcttgcccct agcctggggg
  8221 ctccctagcc cctcccagag catctcaccc ccaccctcat gttcagggtg gatgtgggca
  8281 tgcaggtgac aagggccctg cctccacccc tccagcccat ccagcaatcg ccccctttct
  8341 gccctggggg cccaggatgt agatattgta caaaggtttc taaatccctt cttttctatg
  8401 cactttttta tttaagaggt ggggtcccag gtgggaaccc ccccacaata aagtctgtca
  8461 atgtttggag aaaaaaaaaa aaaaaaaaaa
KMTC (accession No. NM_170606)
(SEQ ID NO: 136)
        1 gaggtgcgcg cgcccgcgcc gatgtgtgtg agtgcgtgtc ctgctcgctc catgttgccg
      61 cctctcccgg tacctgctgc tgctcccggg gctgcgggaa atgcgagagg ctgagccggg
    121 gaggaggaac ccgagcagca gcggcggcgg cggcggccgc ggcggcggga gccccccagg
    181 aggaggaccg ggatccatgt gtctttcctg gtgactagga tgtcgtcgga ggaggacaag
    241 agcgtggagc agccgcagcc gccgccacca ccccccgagg agcctggagc cccggccccg
    301 agccccgcag ccgcagacaa aagacctcgg ggccggcctc gcaaagatgg cgcttcccct
    361 ttccagagag ccagaaagaa acctcgaagt agggggaaaa ctgcagtgga agatgaggac
    421 agcatggatg ggctggagac aacagaaaca gaaacgattg tggaaacaga aatcaaagaa
    481 caatctgcag aagaggatgc tgaagcagaa gtggataaca gcaaacagct aattccaact
    541 cttcagcgat ctgtgtctga ggaatcggca aactccctgg tctctgttgg tgtagaagcc
    601 aaaatcagtg aacagctctg cgctttttgt tactgtgggg aaaaaagttc cttaggacaa
    661 ggagacttaa aacaattcag aataacgcct ggatttatct tgccatggag aaaccaacct
    721 tctaacaaga aggacattga tgacaacagc aatggaacct atgagaaaat gcaaaactca
    781 gcaccacgaa aacaaagagg acagagaaaa gaacgatctc ctcagcagaa tatagtatct
    841 tgtgtaagtg taagcaccca gacagcttca gatgatcaag ctggtaaact gtgggatgaa
    901 ctcagtctgg ttgggcttcc agatgccatt gatatccaag ccttatttga ttctacaggc
    961 acttgttggg ctcatcaccg ttgtgtggag tggtcactag gagtatgcca gatggaagaa
  1021 ccattgttag tgaacgtgga caaagctgtt gtctcaggga gcacagaacg atgtgcattt
  1081 tgtaagcacc ttggagccac tatcaaatgc tgtgaagaga aatgtaccca gatgtatcat
  1141 tatccttgtg ctgcaggagc cggcaccttt caggatttca gtcacatctt cctgctttgt
  1201 ccagaacaca ttgaccaagc tcctgaaaga tcgaaggaag atgcaaactg tgcagtgtgc
  1261 gacagcccgg gagacctctt agatcagttc ttttgtacta cttgtggtca gcactatcat
  1321 ggaatgtgcc tggatatagc ggttactcca ttaaaacgtg caggttggca atgtcctgag
  1381 tgcaaagtgt gccagaactg caaacaatcg ggagaagata gcaagatgct agtgtgtgat
  1441 acgtgtgaca aagggtatca tactttttgt cttcaaccag ttatgaaatc agtaccaacc
  1501 aatggctgga aatgcaaaaa ttgcagaata tgtatagagt gtggcacacg gtctagttct
  1561 cagtggcacc acaattgcct gatatgtgac aattgttacc aacagcagga taacttatgt
  1621 cccttctgtg ggaagtgtta tcatccagaa ttgcagaaag acatgcttca ttgtaatatg
  1681 tgcaaaaggt gggttcacct agagtgtgac aaaccaacag atcatgaact ggatactcag
  1741 ctcaaagaag agtatatctg catgtattgt aaacacctgg gagctgagat ggatcgttta
  1801 cagccaggtg aggaagtgga gatagctgag ctcactacag attataacaa tgaaatggaa
  1861 gttgaaggcc ctgaagatca aatggtattc tcagagcagg cagctaataa agatgtcaac
  1921 ggtcaggagt ccactcctgg aattgttcca gatgcggttc aagtccacac tgaagagcaa
  1981 cagaagagtc atccctcaga aagtcttgac acagatagtc ttcttattgc tgtatcatcc
  2041 caacatacag tgaatactga attggaaaaa cagatttcta atgaagttga tagtgaagac
  2101 ctgaaaatgt cttctgaagt gaagcatatt tgtggcgaag atcaaattga agataaaatg
  2161 gaagtgacag aaaacattga agtcgttaca caccagatca ctgtgcagca agaacaactg
  2221 cagttgttag aggaacctga aacagtggta tccagagaag aatcaaggcc tccaaaatta
  2281 gtcatggaat ctgtcactct tccactagaa accttagtgt ccccacatga ggaaagtatt
  2341 tcattatgtc ctgaggaaca gttggttata gaaaggctac aaggagaaaa ggaacagaaa
  2401 gaaaattctg aactttctac tggattgatg gactctgaaa tgactcctac aattgagggt
  2461 tgtgtgaaag atgtttcata ccaaggaggc aaatctataa agttatcatc tgagacagag
  2521 tcatcatttt catcatcagc agacataagc aaggcagatg tgtcttcctc cccaacacct
  2581 tcttcagact tgccttcgca tgacatgctg cataattacc cttcagctct tagttcctct
  2641 gctggaaaca tcatgccaac aacttacatc tcagtcactc caaaaattgg catgggtaaa
  2701 ccagctatta ctaagagaaa attttctcct ggtagacctc ggtccaaaca gggggcttgg
  2761 agtacccata atacagtgag cccaccttcc tggtccccag acatttcaga aggtcgggaa
  2821 atttttaaac ccaggcagct tcctggcagt gccatttgga gcatcaaagt gggccgtggg
  2881 tctggatttc caggaaagcg gagacctcga ggtgcaggac tgtcggggcg aggtggccga
  2941 ggcaggtcaa agctgaaaag tggaatcgga gctgttgtat tacctggggt gtctactgca
  3001 gatatttcat caaataagga tgatgaagaa aactctatgc acaatacagt tgtgttgttt
  3061 tctagcagtg acaagttcac tttgaatcag gatatgtgtg tagtttgtgg cagttttggc
  3121 caaggagcag aaggaagatt acttgcctgt tctcagtgtg gtcagtgtta ccatccatac
  3181 tgtgtcagta ttaagatcac taaagtggtt cttagcaaag gttggaggtg tcttgagtgc
  3241 actgtgtgtg aggcctgtgg gaaggcaact gacccaggaa gactcctgct gtgtgatgac
  3301 tgtgacataa gttatcacac ctactgccta gaccctccat tgcagacagt tcccaaagga
  3361 ggctggaagt gcaaatggtg tgtttggtgc agacactgtg gagcaacatc tgcaggtcta
  3421 agatgtgaat ggcagaacaa ttacacacag tgcgctcctt gtgcaagctt atcttcctgt
  3481 ccagtctgct atcgaaacta tagagaagaa gatcttattc tgcaatgtag acaatgtgat
  3541 agatggatgc atgcagtttg tcagaactta aatactgagg aagaagtgga aaatgtagca
  3601 gacattggtt ttgattgtag catgtgcaga ccctatatgc ctgcgtctaa tgtgccttcc
  3661 tcagactgct gtgaatcttc acttgtagca caaattgtca caaaagtaaa agagctagac
  3721 ccacccaaga cttataccca ggatggtgtg tgtttgactg aatcagggat gactcagtta
  3781 cagagcctca cagttacagt tccaagaaga aaacggtcaa aaccaaaatt gaaattgaag
  3841 attataaatc agaatagcgt ggccgtcctt cagacccctc cagacatcca atcagagcat
  3901 tcaagggatg gtgaaatgga tgatagtcga gaaggagaac ttatggattg tgatggaaaa
  3961 tcagaatcta gtcctgagcg ggaagctgtg gatgatgaaa ctaagggagt ggaaggaaca
  4021 gatggtgtca aaaagagaaa aaggaaacca tacagaccag gtattggtgg atttatggtg
  4081 cggcaaagaa gtcgaactgg gcaagggaaa accaaaagat ctgtgatcag aaaagattcc
  4141 tcaggctcta tttccgagca gttaccttgc agagatgatg gctggagtga gcagttacca
  4201 gatactttag ttgatgaatc tgtttctgtt actgaaagca ctgaaaaaat aaagaagaga
  4261 taccgaaaaa ggaaaaataa gcttgaagaa actttccctg cctatttaca agaagctttc
  4321 tttggaaaag atcttctaga tacaagtaga caaagcaaga taagtttaga taatctgtca
  4381 gaagatggag ctcagctttt atataaaaca aacatgaaca caggtttctt ggatccttcc
  4441 ttagatccac tacttagttc atcctcggct ccaacaaaat ctggaactca cggtcctgct
  4501 gatgacccat tagctgatat ttctgaagtt ttaaacacag atgatgacat tcttggaata
  4561 atttcagatg atctagcaaa atcagttgat cattcagata ttggtcctgt cactgatgat
  4621 ccttcctctt tgcctcagcc aaatgtcaat cagagttcac gaccattaag tgaagaacag
  4681 ctagatggga tcctcagtcc tgaactagac aaaatggtca cagatggagc aattcttgga
  4741 aaattatata aaattccaga gcttggcgga aaagatgttg aagacttatt tacagctgta
  4801 cttagtcctg cgaacactca gccaactcca ttgccacagc ctcccccacc aacacagctg
  4861 ttgccaatac acaatcagga tgctttttca cggatgcctc tcatgaatgg ccttattgga
  4921 tccagtcctc atctcccaca taattctttg ccacctggaa gcggactggg aactttctct
  4981 gcaattgcac aatcctctta tcctgatgcc agggataaaa attcagcctt taatccaatg
  5041 gcaagtgatc ctaacaactc ttggacatca tcagctccca ctgtggaagg agaaaatgac
  5101 acaatgtcga atgcccagag aagcacgctt aagtgggaga aagaggaggc tctgggtgaa
  5161 atggcaactg ttgccccagt tctctacacc aatattaatt tccccaactt aaaggaagaa
  5221 ttccctgatt ggactactag agtgaagcaa attgccaaat tgtggagaaa agcaagctca
  5281 caagaaagag caccatatgt gcaaaaagcc agagataaca gagctgcttt acgcattaat
  5341 aaagtacaga tgtcaaatga ttccatgaaa aggcagcaac agcaagatag cattgatccc
  5401 agctctcgta ttgattcgga gctttttaaa gatcctttaa agcaaagaga atcagaacat
  5461 gaacaggaat ggaaatttag acagcaaatg cgtcagaaaa gtaagcagca agctaaaatt
  5521 gaagccacac agaaacttga acaggtgaaa aatgagcagc agcagcagca acaacagcaa
  5581 tttggttctc agcatcttct ggtgcagtct ggttcagata caccaagtag tgggatacag
  5641 agtcccttga cacctcagcc tggcaatgga aatatgtctc ctgcacagtc attccataaa
  5701 gaactgttta caaaacagcc acccagtacc cctacgtcta catcttcaga tgatgtgttt
  5761 gtaaagccac aagctccacc tcctcctcca gccccatccc ggattcccat ccaggatagt
  5821 ctttctcagg ctcagacttc tcagccaccc tcaccgcaag tgttttcacc tgggtcctct
  5881 aactcacgac caccatctcc aatggatcca tatgcaaaaa tggttggtac ccctcgacca
  5941 cctcctgtgg gccatagttt ttccagaaga aattctgctg caccagtgga aaactgtaca
  6001 cctttatcat cggtatctag gccccttcaa atgaatgaga caacagcaaa taggccatcc
  6061 cctgtcagag atttatgttc ttcttccacg acaaataatg acccctatgc aaaacctcca
  6121 gacacaccta ggcctgtgat gacagatcaa tttcccaaat ccttgggcct atcccggtct
  6181 cctgtagttt cagaacaaac tgcaaaaggc cctatagcag ctggaaccag tgatcacttt
  6241 actaaaccat ctcctagggc agatgtgttt caaagacaaa ggatacctga ctcatatgca
  6301 cgacccttgt tgacacctgc acctcttgat agtggtcctg gaccttttaa gactccaatg
  6361 caacctcctc catcctctca ggatccttat ggatcagtgt cacaggcatc aaggcgattg
  6421 tctgttgacc cttatgaaag gcctgctttg acaccaagac ctatagataa tttttctcat
  6481 aatcagtcaa atgatccata tagtcagcct ccccttaccc cacatccagc agtgaatgaa
  6541 tcttttgccc atccttcaag ggctttttcc cagcctggaa ccatatcaag gccaacatct
  6601 caggacccat actcccaacc cccaggaact ccacgacctg ttgtagattc ttattcccaa
  6661 tcttcaggaa cagctaggtc caatacagac ccttactctc aacctcctgg aactccccgg
  6721 cctactactg ttgacccata tagtcagcag ccccaaaccc caagaccatc tacacaaact
  6781 gacttgtttg ttacacctgt aacaaatcag aggcattctg atccatatgc tcatcctcct
  6841 ggaacaccaa gacctggaat ttctgtccct tactctcagc caccagcaac accaaggcca
  6901 aggatttcag agggttttac taggtcctca atgacaagac cagtcctcat gccaaatcag
  6961 gatcctttcc tgcaagcagc acaaaaccga ggaccagctt tacctggccc gttggtaagg
  7021 ccacctgata catgttccca gacacctagg ccccctggac ctggtctttc agacacattt
  7081 agccgtgttt ccccatctgc tgcccgtgat ccctatgatc agtctccaat gactccaaga
  7141 tctcagtctg actcttttgg aacaagtcaa actgcccatg atgttgctga tcagccaagg
  7201 cctggatcag aggggagctt ctgtgcatct tcaaactctc caatgcactc ccaaggccag
  7261 cagttctctg gtgtctccca acttcctgga cctgtgccaa cttcaggagt aactgataca
  7321 cagaatactg taaatatggc ccaagcagat acagagaaat tgagacagcg gcagaagtta
  7381 cgtgaaatca ttctccagca gcaacagcag aagaagattg caggtcgaca ggagaagggg
  7441 tcacaggact cacccgcagt gcctcatcca gggcctcttc aacactggca accagagaat
  7501 gttaaccagg ctttcaccag acccccacct ccctatcctg ggaacattag gtctcctgtt
  7561 gcccctcctt taggacctag atatgctgtt ttcccaaaag atcagcgtgg accctatcct
  7621 cctgatgttg ctagtatggg gatgagacct catggattta gatttggatt tccaggaggt
  7681 agtcatggta ccatgccgag tcaagagcgc ttccttgtgc ctcctcagca aatacaggga
  7741 tctggagttt ctccacagct aagaagatca gtatctgtag atatgcctag gcctttaaat
  7801 aactcacaaa tgaataatcc agttggactt cctcagcatt tttcaccaca gagcttgcca
  7861 gttcagcagc acaacatact gggccaagca tatattgaac tgagacatag ggctcctgac
  7921 ggaaggcaac ggctgccttt cagtgctcca cctggcagcg ttgtagaggc atcttctaat
  7981 ctgagacatg gaaacttcat tccccggcca gactttccgg gccctagaca cacagacccc
  8041 atgcgacgac ctccccaggg tctacctaat cagctacctg tgcacccaga tttggaacaa
  8101 gtgccaccat ctcaacaaga gcaaggtcat tctgtccatt catcttctat ggtcatgagg
  8161 actctgaacc atccactagg tggtgaattt tcagaagctc ctttgtcaac atctgtaccg
  8221 tctgaaacaa cgtctgataa tttacagata accacccagc cttctgatgg tctagaggaa
  8281 aaacttgatt ctgatgaccc ttctgtgaag gaactggatg ttaaagacct tgagggggtt
  8341 gaagtcaaag acttagatga tgaagatctt gaaaacttaa atttagatac agaggatggc
  8401 aaggtagttg aattggatac tttagataat ttggaaacta atgatcccaa cctggatgac
  8461 ctcttaaggt caggagagtt tgatatcatt gcatatacag atccagaact tgacatggga
  8521 gataagaaaa gcatgtttaa tgaggaacta gaccttccaa ttgatgataa gttagataat
  8581 cagtgtgtat ctgttgaacc aaaaaaaaag gaacaagaaa acaaaactct ggttctctct
  8641 gataaacatt caccacagaa aaaatccact gttaccaatg aggtaaaaac ggaagtactg
  8701 tctccaaatt ctaaggtgga atccaaatgt gaaactgaaa aaaatgatga gaataaagat
  8761 aatgttgaca ctccttgctc acaggcttct gctcactcag acctaaatga tggagaaaag
  8821 acttctttgc atccttgtga tccagatcta tttgagaaaa gaaccaatcg agaaactgct
  8881 ggccccagtg caaatgtcat tcaggcatcc actcaactac ctgctcaaga tgtaataaac
  8941 tcttgtggca taactggatc aactccagtt ctctcaagtt tacttgctaa tgagaaatct
  9001 gataattcag acattaggcc atcggggtct ccaccaccac caactctgcc ggcctcccca
  9061 tccaatcatg tgtcaagttt gcctcctttc atagcaccgc ctggccgtgt tttggataat
  9121 gccatgaatt ctaatgtgac agtagtctct agggtaaacc atgttttttc tcagggtgtg
  9181 caggtaaacc cagggctcat tccaggtcaa tcaacagtta accacagtct ggggacagga
  9241 aaacctgcaa ctcaaactgg gcctcaaaca agtcagtctg gtaccagtag catgtctgga
  9301 ccccaacagc taatgattcc tcaaacatta gcacagcaga atagagagag gccccttctt
  9361 ctagaagaac agcctctact tctacaggat cttttggatc aagaaaggca agaacagcag
  9421 cagcaaagac agatgcaagc catgattcgt cagcgatcag aaccgttctt ccctaatatt
  9481 gattttgatg caattacaga tcctataatg aaagccaaaa tggtggccct taaaggtata
  9541 aataaagtga tggcacaaaa caatctgggc atgccaccaa tggtgatgag caggttccct
  9601 tttatgggcc aggtggtaac tggaacacag aacagtgaag gacagaacct tggaccacag
  9661 gccattcctc aggatggcag tataacacat cagatttcta ggcctaatcc tccaaatttt
  9721 ggtccaggct ttgtcaatga ttcacagcgt aagcagtatg aagagtggct ccaggagacc
  9781 caacagctgc ttcaaatgca gcagaagtat cttgaagaac aaattggtgc tcacagaaaa
  9841 tctaagaagg ccctttcagc taaacaacgt actgccaaga aagctgggcg tgaatttcca
  9901 gaggaagatg cagaacaact caagcatgtt actgaacagc aaagcatggt tcagaaacag
  9961 ctagaacaga ttcgtaaaca acagaaagaa catgctgaat tgattgaaga ttatcggatc
10021 aaacagcagc agcaatgtgc aatggcccca cctaccatga tgcccagtgt ccagccccag
10081 ccacccctaa ttccaggtgc cactccaccc accatgagcc aacccacctt tcccatggtg
10141 ccacagcagc ttcagcacca gcagcacaca acagttattt ctggccatac tagccctgtt
10201 agaatgccca gtttacctgg atggcaaccc aacagtgctc ctgcccacct gcccctcaat
10261 cctcctagaa ttcagccccc aattgcccag ttaccaataa aaacttgtac accagcccca
10321 gggacagtct caaatgcaaa tccacagagt ggaccaccac ctcgggtaga atttgatgac
10381 aacaatccct ttagtgaaag ttttcaagaa cgggaacgta aggaacgttt acgagaacag
10441 caagagagac aacggatcca actcatgcag gaggtagata gacaaagagc tttgcagcag
10501 aggatggaaa tggagcagca tggtatggtg ggctctgaga taagtagtag taggacatct
10561 gtgtcccaga ttcccttcta cagttccgac ttaccttgtg attttatgca acctctagga
10621 ccccttcagc agtctccaca acaccaacag caaatggggc aggttttaca gcagcagaat
10681 atacaacaag gatcaattaa ttcaccctcc acccaaactt tcatgcagac taatgagcga
10741 aggcaggtag gccctccttc atttgttcct gattcaccat caatccctgt tggaagccca
10801 aatttttctt ctgtgaagca gggacatgga aatctttctg ggaccagctt ccagcagtcc
10861 ccagtgaggc cttcttttac acctgcttta ccagcagcac ctccagtagc taatagcagt
10921 ctcccatgtg gccaagattc tactataacc catggacaca gttatccggg atcaacccaa
10981 tcgctcattc agttgtattc tgatataatc ccagaggaaa aagggaaaaa gaaaagaaca
11041 agaaagaaga aaagagatga tgatgcagaa tccaccaagg ctccatcaac tccccattca
11101 gatataactg ccccaccgac tccaggcatc tcagaaacta cctctactcc tgcagtgagc
11161 acacccagtg agcttcctca acaagccgac caagagtcgg tggaaccagt cggcccatcc
11221 actcccaata tggcagcagg ccagctatgt acagaattag agaacaaact gcccaatagt
11281 gatttctcac aagcaactcc aaatcaacag acgtatgcaa attcagaagt agacaagctc
11341 tccatggaaa cccctgccaa aacagaagag ataaaactgg aaaaggctga gacagagtcc
11401 tgcccaggcc aagaggagcc taaattggag gaacagaatg gtagtaaggt agaaggaaac
11461 gctgtagcct gtcctgtctc ctcagcacag agtcctcccc attctgctgg ggcccctgct
11521 gccaaaggag actcagggaa tgaacttctg aaacacttgt tgaaaaataa aaagtcatct
11581 tctcttttga atcaaaaacc tgagggcagt atttgttcag aagatgactg tacaaaggat
11641 aataaactag ttgagaagca gaacccagct gaaggactgc aaactttggg ggctcaaatg
11701 caaggtggtt ttggatgtgg caaccagttg ccaaaaacag atggaggaag tgaaaccaag
11761 aaacagcgaa gcaaacggac tcagaggacg ggtgagaaag cagcacctcg ctcaaagaaa
11821 aggaaaaagg acgaagagga gaaacaagct atgtactcta gcactgacac gtttacccac
11881 ttgaaacagc agaataattt aagtaatcct ccaacacccc ctgcctctct tcctcctaca
11941 ccacctccta tggcttgtca gaagatggcc aatggttttg caacaactga agaacttgct
12001 ggaaaagccg gagtgttagt gagccatgaa gttaccaaaa ctctaggacc taaaccattt
12061 cagctgccct tcagacccca ggacgacttg ttggcccgag ctcttgctca gggccccaag
12121 acagttgatg tgccagcctc cctcccaaca ccacctcata acaatcagga agaattaagg
12181 atacaggatc actgtggtga tcgagatact cctgacagtt ttgttccctc atcctctcct
12241 gagagtgtgg ttggggtaga agtgagcagg tatccagatc tgtcattggt caaggaggag
12301 cctccagaac cggtgccgtc ccccatcatt ccaattcttc ctagcactgc tgggaaaagt
12361 tcagaatcaa gaaggaatga catcaaaact gagccaggca ctttatattt tgcgtcacct
12421 tttggtcctt ccccaaatgg tcccagatca ggtcttatat ctgtagcaat tactctgcat
12481 cctacagctg ctgagaacat tagcagtgtt gtggctgcat tttccgacct tcttcacgtc
12541 cgaatcccta acagctatga ggttagcagt gctccagatg tcccatccat gggtttggtc
12601 agtagccaca gaatcaaccc gggtttggag tatcgacagc atttacttct ccgtgggcct
12661 ccgccaggat ctgcaaaccc tcccagatta gtgagctctt accggctgaa gcagcctaat
12721 gtaccatttc ctccaacaag caatggtctt tctggatata aggattctag tcatggtatt
12781 gcagaaagcg cagcactcag accacagtgg tgttgtcatt gtaaagtggt tattcttgga
12841 agtggtgtgc ggaaatcttt caaagatctg acccttttga acaaggattc ccgagaaagc
12901 accaagaggg tagagaagga cattgtcttc tgtagtaata actgctttat tctttattca
12961 tcaactgcac aagcgaaaaa ctcagaaaac aaggaatcca ttccttcatt gccacaatca
13021 cctatgagag aaacgccttc caaagcattt catcagtaca gcaacaacat ctccactttg
13081 gatgtgcact gtctccccca gctcccagag aaagcttctc cccctgcctc accacccatc
13141 gccttccctc ctgcttttga agcagcccaa gtcgaggcca agccagatga gctgaaggtg
13201 acagtcaagc tgaagcctcg gctaagagct gtccatggtg ggtttgaaga ttgcaggccg
13261 ctcaataaaa aatggagagg aatgaaatgg aagaagtgga gcattcatat tgtaatccct
13321 aaggggacat ttaaaccacc ttgtgaggat gaaatagatg aatttctaaa gaaattgggc
13381 acttccctta aacctgatcc tgtgcccaaa gactatcgga aatgttgctt ttgtcatgaa
13441 gaaggtgatg gattgacaga tggaccagca aggctactca accttgactt ggatctgtgg
13501 gtccacttga actgcgctct gtggtccacg gaggtctatg agactcaggc tggtgcctta
13561 ataaatgtgg agctagctct gaggagaggc ctacaaatga aatgtgtctt ctgtcacaag
13621 acgggtgcca ctagtggatg ccacagattt cgatgcacca acatttatca cttcacttgc
13681 gccattaaag cacaatgcat gttttttaag gacaaaacta tgctttgccc catgcacaaa
13741 ccaaagggaa ttcatgagca agaattaagt tactttgcag tcttcaggag ggtctatgtt
13801 cagcgtgatg aggtgcgaca gattgctagc atcgtgcaac gaggagaacg ggaccatacc
13861 tttcgcgtgg gtagcctcat cttccacaca attggtcagc tgcttccaca gcagatgcaa
13921 gcattccatt ctcctaaagc actcttccct gtgggctatg aagccagccg gctgtactgg
13981 agcactcgct atgccaatag gcgctgccgc tacctgtgct ccattgagga gaaggatggg
14041 cgcccagtgt ttgtcatcag gattgtggaa caaggccatg aagacctggt tctaagtgac
14101 atctcaccta aaggtgtctg ggataagatt ttggagcctg tggcatgtgt gagaaaaaag
14161 tctgaaatgc tccagctttt cccagcgtat ttaaaaggag aggatctgtt tggcctgacc
14221 gtctctgcag tggcacgcat agcggaatca cttcctgggg ttgaggcatg tgaaaattat
14281 accttccgat acggccgaaa tcctctcatg gaacttcctc ttgccgttaa ccccacaggt
14341 tgtgcccgtt ctgaacctaa aatgagtgcc catgtcaaga ggtttgtgtt aaggcctcac
14401 accttaaaca gcaccagcac ctcaaagtca tttcagagca cagtcactgg agaactgaac
14461 gcaccttata gtaaacagtt tgttcactcc aagtcatcgc agtaccggaa gatgaaaact
14521 gaatggaaat ccaatgtgta tctggcacgg tctcggattc aggggctggg cctgtatgct
14581 gctcgagaca ttgagaaaca caccatggtc attgagtaca tcgggactat cattcgaaac
14641 gaagtagcca acaggaaaga gaagctttat gagtctcaga accgtggtgt gtacatgttc
14701 cgcatggata acgaccatgt gattgacgcg acgctcacag gagggcccgc aaggtatatc
14761 aaccattcgt gtgcacctaa ttgtgtggct gaagtggtga cttttgagag aggacacaaa
14821 attatcatca gctccagtcg gagaatccag aaaggagaag agctctgcta tgactataag
14881 tttgactttg aagatgacca gcacaagatt ccgtgtcact gtggagctgt gaactgccgg
14941 aagtggatga actgaaatgc attccttgct agctcagcgg gcggcttgtc cctaggaaga
15001 ggcgattcaa cacaccattg gaattttgca gacagaaaga gatttttgtt ttctgtttta
15061 tgactttttg aaaaagcttc tgggagttct gatttcctca gtcctttagg ttaaagcagc
15121 gccaggagga agctgacaga agcagcgttc ctgaagtggc cgaggttaaa cggaatcaca
15181 gaatggtcca gcacttttgc ttttttttct tttccttttc tttttttttt gtttgttttt
15241 tgttttgttt ttcccttgtg ggtgggtttc attgttttgg ttttctagtc tcactaagga
15301 gaaactttta ctggggcaaa gagccgatgg ctgccctgcc ccgggcaggg gccttcctat
15361 gaatgtaaga ctgaaatcac cagcgagggg gacagagagt gctggccacg gccttattaa
15421 aaaggggcag gccctctaac ttcaaaatgt ttttaaataa agtagacacc actgaacaag
15481 gaatgtactg aaatgacttc cttagggata gagctaaggg ataataactt gcactaaata
15541 catttaaata cttgattcca tgagtcagtt tattgtagtt tttgatttct gtaaaataag
15601 agaaactttt gtatttatta ttgaataagt gaatgaagct atttttaaat aaagttagaa
15661 gaaagccaag ctgctgctgt tacctgcaga actaacaaac cctgttactt tgtacagata
15721 tgtaaatatt ttgagaaaaa atacagtata aaaatagtta ttgaccaaat gctaccaggc
15781 tctgcagcag ctcgggggct tataaaatgt tcatagggat gttacaatat aattttgtgt
15841 tataaaatat gccattataa ttatgtaata accaaaattt caacctagag tgttgggggt
15901 tttttggaaa ccgcagtcta ttagtactca atggttttat acaccttact tctgacagag
15961 cggggcgtat gctacgacta caacttttat agctgttttg gtaatttaaa ctaatttttt
16021 catattatat tgttgcatcc ctacttcttc agtcaggttt ttttgtgctt acaatttgtg
16081 ataactgtga ataactgctt aaaaatacac ccaaatggag gctgaatttt ttcttcagca
16141 aaagtagttt tgattagaac tttgtttcag ccacagagaa tcatgtaaac gtaataggat
16201 catgtagcag aaacttaaat ctaacccttt agccttctat ttaacacaaa aatttgaaaa
16261 agttaaaaaa aaaaaggaga tgtgattatg cttacagctg caggactctg gcaatagggt
16321 ttttggaaga tgtaatttta aaatgtgttt gtatgaactg tttgtttaca tttctttaat
16381 aaaaaaaaca ctgttttgtg tttgcttgta gaaacttaat cagcattttg aaccaggtta
16441 gctttttatt ttgtacttaa aattctggta ctgacacttc acaggctaag tataaaatga
16501 agttttgtgt gcacaattca agtggactgt aaactgttgg tatattcagt gatgcagttc
16561 tgaacttgta tatggcatga tgtattttta tcttacagaa taaatcaatt gtatatattt
16621 ttctcttgat aaatagctgt atgaaatttg tttcctgaat atttttcttc tcttgtacaa
16681 tatcctgaca tcctaccagt atttgtccta ccgggttttt gttgttttct gttctgtata
16741 atagtatcta atgttggcaa aaattgaatt ttttgaagta tacagagtgt tatgggtttt
16801 ggaatttgtg gacacagatt tagaagatca ccatttacaa ataaaatatt ttacatctat
16861 aaaaaaaaaa aa
KAT8 (accession No. NM_032188):
(SEQ ID NO: 137)
        1 gtcacttccc ttcccgcgat ggcggcacag ggagctgctg cggcggttgc ggcggggact
      61 tcaggggtcg cgggggaggg cgagcccggg cccggggaga atgcggccgc tgaggggacc
    121 gccccatccc cgggccgcgt ctctccgccg accccggcgc gcggcgagcc ggaagtcacg
    181 gtggagatcg gagaaacgta cctgtgccgg cgaccggata gcacctggca ttctgctgaa
    241 gtgatccagt ctcgagtgaa cgaccaggag ggccgagagg aattctatgt acactacgtg
    301 ggctttaacc ggcggctgga cgagtgggta gacaagaacc ggctggcgct gaccaagaca
    361 gtgaaggatg ctgtacagaa gaactcagag aagtacctga gcgagctcgc agagcagcct
    421 gagcgcaaga tcactcgcaa ccaaaagcgc aagcatgatg agatcaacca tgtgcagaag
    481 acttatgcag agatggaccc caccacagca gccttggaga aggagcatga ggcgatcacc
    541 aaggtgaagt atgtggacaa gatccacatc gggaactacg aaattgatgc ctggtatttc
    601 tcaccattcc ccgaagacta tgggaaacag cccaagctct ggctctgcga gtactgcctc
    661 aagtacatga aatatgagaa gagctaccgc ttccacttgg gtcagtgcca gtggcggcag
    721 ccccccggga aagagatcta ccgcaagagc aacatctccg tgtacgaagt tgatggcaaa
    781 gaccataaga tttactgtca gaacctgtgt ctgctggcca agcttttcct ggaccataag
    841 acactgtact ttgacgtgga gccgttcgtc ttttacatcc tgactgaggt ggaccggcag
    901 ggggcccaca ttgttggcta cttctccaag gagaaggagt ccccggatgg aaacaatgtg
    961 gcctgcatcc tgaccttgcc cccctaccaa cgccgcggct acgggaagtt cctcatcgct
  1021 ttcagttatg agctctccaa gctggagagc acagtcggct ccccggagaa gccactgtct
  1081 gacctgggca agctcagcta ccgcagctac tggtcctggg tgctgctaga gatcctgcgg
  1141 gacttccggg gcacactgtc catcaaggac ctcagccaga tgaccagtat cacccaaaat
  1201 gacatcatca gtaccctgca atccctcaat atggtcaagt actggaaggg ccagcacgtg
  1261 atctgtgtca cacccaagct ggtggaggag cacctcaaaa gtgcccagta taagaaacca
  1321 cccatcacag tggactccgt ctgcctcaag tgggcacccc ccaagcacaa gcaagtcaag
  1381 ctctccaaga agtgagcagc ctggcccctg ctgtcggacc tgagcctcct ggctcccagc
  1441 ctgtaaatat gtatagacct gttttgtcat ttttttaata aagtcagttc tggtggccct
  1501 ggactttgga ggggaagggg aggccaagaa aaaaaaaaaa aaaaaa
KDM6A (accession No. NM_001291415):
(SEQ ID NO: 138)
        1 gtgtgacaca attacaacaa ctttgtgctg gtgccgggga agtttgtgtc tccaacgaat
      61 cccctcagtg ctccccagcc ccgcgcgctc cggccgttcc cgccgtcccc gcctgtggct
    121 gccccctgcc caaccccgcg atgtgaccct acagccgaaa gccgccgctg ccgacccggg
    181 ggctccgcag cccctgccgc cgccgccgcc gccttcaccg ccgccgcgtt gggatttttc
    241 gtcgccgccg cccgcggcgg aggaggaggc ggcgataaag ttggtgtgct ggtcccgcgc
    301 gcagattggg ggcgtcactg cgggccccgg tccgaggggg ggtgtcggcg ttggagttgt
    361 gaattcgctg cgtttccatg aaatcctgcg gagtgtcgct cgctaccgcc gccgctgccg
    421 ccgccgcttt cggtgatgag gaaaagaaaa tggcggcggg aaaagcgagc ggcgagagcg
    481 aggaggcgtc ccccagcctg acagccgagg agagggaggc gctcggcgga ctggacagcc
    541 gcctctttgg gttcgtgaga tttcatgaag atggcgccag gacgaaggcc ctactgggca
    601 aggctgttcg ctgctatgaa tctctaatct taaaagctga aggaaaagtg gagtctgatt
    661 tcttttgtca attaggtcac ttcaacctct tattggaaga ttatccaaaa gcattatctg
    721 cataccagag gtactacagt ttacagtctg actactggaa gaatgctgcc tttttatatg
    781 gtcttggttt ggtctacttc cattataatg catttcagtg ggcaattaaa gcatttcagg
    841 aggtgcttta tgttgatccc agcttttgtc gagccaagga aattcattta cgacttgggc
    901 ttatgttcaa agtgaacaca gactatgagt ctagtttaaa gcattttcag ttagctttgg
    961 ttgactgtaa tccctgcact ttgtccaatg ctgaaattca atttcacatt gcccacttat
  1021 atgaaaccca gaggaaatat cattctgcaa aagaagctta tgaacaactt ttgcagacag
  1081 agaatctttc tgcacaagta aaagcaactg tcttacaaca gttaggttgg atgcatcaca
  1141 ctgtagatct cctgggagat aaagccacca aggaaagcta tgctattcag tatctccaaa
  1201 agtccttgga agcagatcct aattctggcc agtcctggta tttcctcgga aggtgctatt
  1261 caagtattgg gaaagttcag gatgccttta tatcttacag gcagtctatt gataaatcag
  1321 aagcaagtgc agatacatgg tgttcaatag gtgtgctata tcagcagcaa aatcagccca
  1381 tggatgcttt acaggcctat atttgtgctg tacaattgga ccatggccat gctgcagcct
  1441 ggatggacct aggcactctc tatgaatcct gcaaccagcc tcaggatgcc attaaatgct
  1501 acttaaatgc aactagaagc aaaagttgta gtaatacctc tgcacttgca gcacgaatta
  1561 agtatttaca ggctcagttg tgtaaccttc cacaaggtag tctacagaat aaaactaaat
  1621 tacttcctag tattgaggag gcgtggagcc taccaattcc cgcagagctt acctccaggc
  1681 agggtgccat gaacacagca cagcaggcat gtaaacctca tcatccaaat actgaacctg
  1741 tattaggcct cagtcaaaca ccaatttcac agcaatcctt gccactacac atgattcctt
  1801 ctagccaagt agatgacctg tccagtcctg ccaagaggaa aagaacatct agtccaacaa
  1861 agaatacttc tgacaattgg agtggtggac atgctgtgtc acatcctcca gtacagcaac
  1921 aagctcattc atggtgtttg acaccacaga aattacagca tttggaacag ctccgcgcaa
  1981 atagaaataa tttaaatcca gcacagaaac tgatgctgga acagctggaa agtcagtttg
  2041 tcttaatgca acaacaccaa atgagaccaa caggagttgc acaggtacga tctactggaa
  2101 ttcctaatgg gccaacagct gactcatcac tgcctacaaa ctcagtctct ggccagcagc
  2161 cacagcttgc tctgaccaga gtgcctagcg tctctcagcc tggagtccgt cctgcctgcc
  2221 ctgggcagcc tttggccaat ggaccctttt ctgcaggcca tgttccctgt agcacatcaa
  2281 gaacgctggg aagtacagac actattttga taggcaataa tcatataaca ggaagtggaa
  2341 gtaatggaaa cgtgccttac ctgcagcgaa acgcactcac tctacctcat aaccgcacaa
  2401 acctgaccag cagcgcagag gagccgtgga aaaaccaact atctaactcc actcaggggc
  2461 ttcacaaagg tcagagttca cattcggcag gtcctaatgg tgaacgacct ctctcttcca
  2521 ctgggccttc ccagcatctc caggcagctg gctctggtat tcagaatcag aacggacatc
  2581 ccaccctgcc tagcaattca gtaacacagg gggctgctct caatcacctc tcctctcaca
  2641 ctgctacctc aggtggacaa caaggcatta ccttaaccaa agagagcaag ccttcaggaa
  2701 acatattgac ggtgcctgaa acaagcaggc acactggaga gacacctaac agcactgcca
  2761 gtgtcgaggg acttcctaat catgtccatc agatgacggc agatgctgtt tgcagtccta
  2821 gccatggaga ttctaagtca ccaggtttac taagttcaga caatcctcag ctctctgcct
  2881 tgttgatggg aaaagccaat aacaatgtgg gtactggaac ctgtgacaaa gtcaataaca
  2941 tccacccagc tgttcataca aagactgata actctgttgc ctcttcacca tcttcagcca
  3001 tttcaacagc aacaccttct ccaaaatcca ctgagcagac aaccacaaac agtgttacca
  3061 gccttaacag ccctcacagt gggctacaca caattaatgg agaagggatg gaagaatctc
  3121 agagccccat gaaaacagat ctgcttctgg ttaaccacaa acctagtcca cagatcatac
  3181 catcaatgtc tgtgtccata taccccagct cagcagaagt tctgaaggca tgcaggaatc
  3241 taggtaaaaa tggcttatct aacagtagca ttttgttgga taaatgtcca cctccaagac
  3301 caccatcttc accataccct cccttgccaa aggacaagtt gaatccacct acacctagta
  3361 tttacttgga aaataaacgt gatgctttct ttcctccatt acatcaattt tgtacaaatc
  3421 cgaacaaccc tgttacagta atacgtggcc ttgctggagc tcttaagtta gacctgggac
  3481 ttttctctac taaaactttg gtggaagcta acaatgaaca tatggtagaa gtgaggacac
  3541 agttgttgca gccagcagat gaaaactggg atcccactgg aacaaagaaa atctggcatt
  3601 gtgaaagtaa tagatctcat actacaattg ctaaatatgc acagtaccag gcctcctcat
  3661 tccaggaatc attgagagaa gaaaatgaaa aaagaagtca tcataaagac cactcagata
  3721 gtgaatctac atcgtcagat aattctggga ggaggaggaa aggacccttt aaaaccataa
  3781 agtttgggac caatattgac ctatctgatg acaaaaagtg gaagttgcag ctacatgagc
  3841 tgactaaact tcctgctttt gtgcgtgtcg tatcagcagg aaatcttcta agccatgttg
  3901 gtcataccat attgggcatg aacacagttc aactatacat gaaagttcca gggagcagaa
  3961 caccaggtca tcaggaaaat aacaacttct gttcagttaa cataaatatt ggcccaggtg
  4021 actgtgaatg gtttgttgtt cctgaaggtt actggggtgt tctgaatgac ttctgtgaaa
  4081 aaaataattt gaatttccta atgggttctt ggtggcccaa tcttgaagat ctttatgaag
  4141 caaatgttcc agtgtatagg tttattcagc gacctggaga tttggtctgg ataaatgcag
  4201 gcactgttca ttgggttcag gctattggct ggtgcaacaa cattgcttgg aatgttggtc
  4261 cacttacagc ctgccagtat aaattggcag tggaacggta cgaatggaac aaattgcaaa
  4321 gtgtgaagtc aatagtaccc atggttcatc tttcctggaa tatggcacga aatatcaagg
  4381 tctcagatcc aaagcttttt gaaatgatta agtattgtct tctaagaact ctgaagcaat
  4441 gtcagacatt gagggaagct ctcattgctg caggaaaaga gattatatgg catgggcgga
  4501 caaaagaaga accagctcat tactgtagca tttgtgaagt ggaggttttt gatctgcttt
  4561 ttgtcactaa tgagagtaat tcacgaaaga cctacatagt acattgccaa gattgtgcac
  4621 gaaaaacaag cggaaacttg gaaaactttg tggtgctaga acagtacaaa atggaggacc
  4681 tgatgcaagt ctatgaccaa tttacattag ctcctccatt accatccgcc tcatcttgat
  4741 attgttccat ggacattaaa tgagaccttt tctgctattc aggaaataac ccagttctgc
  4801 accactggtt tttgtagcta tctcgtaagg ctgctggctg aaaactgtgt ctatgcaacc
  4861 ttccaagtgc ggagtgtcaa ccaactggac gggagagagt actgctccta ctccaggact
  4921 ctcacaaagc tgatgagctg tacttcagaa aaaaataata atttccatgt tttgtatata
  4981 tctgacaaaa ctggcaacat cttacagact actgacttga agacaacctc ttttatattt
  5041 ctctatttct gggctgatga atttgttttc atctgtcttt tcccccttca gaattttcct
  5101 tggaaaaaaa atactagcct agctggtcat ttctttgtaa ggtagttagc aattttaagt
  5161 ctttctttgg tcaacttttt tttaatgtga aaagttaggt aagacacttt tttactgctt
  5221 ttatgttttt ctgtcttgtt ttgagaccat gatggttaca cttttggttc ctaaataaaa
  5281 tttaaaaaat taacagccaa gtcacaaagg taatggattg cacatagact aaggaataaa
  5341 cttcagattt gtgatttttg tttctaatct tgatgtaaat ttacactatt tataaataca
  5401 Tatttattgc Ttgaaaatat Ttgtgaatgg Aatgctgtta Ttttttccag Atttacctgc
  5461 cattgaaatt ttaaggagtt ctgtaatttc aaacactact cctattacat tttctatgtg
  5521 taaataaaac tgcttagcat tgtacagaaa cttttattaa aattgtttaa tgtttaaaga
  5581 gttttctatt gtttgagttt taaaaaagac tttatgtaca gtgcccagtt tttgttcatt
  5641 tttgaaatct gattatatat attttatata tacttatgta tgtatatata atatatatag
  5701 aaatctggat atatatgtat aaatctttag aacttaaatt tttctcgttt taagtttcac
  5761 atctatggta gatttttgag gtgtctactg taaagtattg cttacaaaaa gtatgattat
  5821 ttttaaagaa atatatatgg tatgtatcct caagacctaa aatgtcagac tggtttattg
  5881 ttaagttgca attactgcaa tgacagacca ataaacaatt gctgccaaaa tgtagtataa
  5941 a
NCOA6 (accession No. NM_014071):
(SEQ ID NO: 139)
        1 gtgaggccct gccgggtcgg gctgcgggcg gccgggcgcg ggcggcggga cagacgggcg
      61 cacgcgagga ctgacggacg gacgcaccga gggcggcggg cacgcacggc ccgggccggc
    121 gctccaaggc ccgcccggga gggccggggc cgcgctcaga attttgattt ggctgctggg
    181 ctgctacctt gaaatccaag ccctaaaaat gccagcttct ttggacttag aagatgacct
    241 ggataaatga taaaaattaa gaaagagatt ttgaagtttt cttattgtcc tcttggcata
    301 tgcttctgga ataatattca ccatggtttt ggatgacctt ccaaacttag aagacatcta
    361 tacttccttg tgttcatcaa caatggaaga ctcagagatg gattttgact ctggactaga
    421 agatgatgac acaaaaagtg atagtatttt ggaggattcc acaatttttg tggccttcaa
    481 aggaaatata gatgataaag acttcaaatg gaaattagat gcaatattga aaaacgtgcc
    541 caatttctta cacatggagt ccagcaagct aaaagtacag aaggtggagc cctggaacag
    601 cgtgcgtgtg acattcaaca tcccccggga agcagcggag cggctacgga tccttgctca
    661 gagcaacaac cagcagcttc gggatttagg gattctctcc gttcagattg aaggggaagg
    721 tgctattaac ctggctttgg ctcagaaccg aagccaagat gtgagaatga atggacccat
    781 gggagctgga aattcagtta ggatggaggc gggatttcct atggcaagtg gtccaggaat
    841 aataaggatg aacaaccctg ccactgttat gatacccccg ggtggaaatg tgtcatcttc
    901 catgatggca ccaggcccca atccagagct gcagcccagg actcctcgcc ctgcttctca
    961 gtcagatgca atggatccac tcctctctgg gctccatata cagcagcaaa gtcatccctc
  1021 aggatcttta gctcccccac atcacccaat gcagcctgtc tctgtgaaca gacaaatgaa
  1081 cccagctaat tttccccagc tgcagcagca gcagcaacaa caacaacagc agcagcagca
  1141 gcagcagcag caacaacagc aacagcagca acaacagttg caggcaagac ccccacagca
  1201 acatcagcag caacagccac agggaattcg accccagttt actgccccaa ctcaggtgcc
  1261 tgttcctcca ggctggaacc agctgccttc tggagccctt caacctcctc cagcccaggg
  1321 ttctctgggc acaatgactg caaaccaagg gtggaagaag gctcccttgc ccggcccaat
  1381 gcaacagcaa ctccaggcaa gaccatcctt agccacggta cagacgcctt cccaccctcc
  1441 ccctccatat ccctttggca gccagcaagc ctcacaagcc cacacaaact ttcctcagat
  1501 gagcaaccca ggccagttca cagctcctca gatgaagagt ttgcagggag ggccctctag
  1561 ggtcccaact cccttgcagc agccccacct caccaacaag tctcctgcct cctcaccctc
  1621 ctccttccag cagggatccc ctgcatcctc cccaacggtt aaccaaactc agcagcagat
  1681 gggaccaagg ccacctcaaa ataacccact tccccaggga tttcagcagc ctgtcagctc
  1741 tccgggtcgg aatcctatgg ttcaacaggg aaatgtgcca cctaacttca tggtgatgca
  1801 gcagcaacca ccaaaccagg ggccacagag tttacatcca ggcctaggag gaatgcctaa
  1861 acgcctccca cctggcttct cagcaggaca ggccaatccg aactttatgc aaggtcaggt
  1921 gccttcgacc acagcaacca cccctgggaa ttcaggagcc cctcagctgc aagcaaatca
  1981 aaatgtccag catgcaggtg gtcaaggagc tggtcctcct caaaaccaga tgcaggtgtc
  2041 ccacgggccg ccaaatatga tgcagcccag cctcatggga attcatggca acatgaacaa
  2101 tcagcaggct ggtacttctg gggttcctca agtgaacctc agcaacatgc aaggccagcc
  2161 ccagcagggc ccaccatctc agctgatggg catgcaccag caaatcgtgc cctcccaggg
  2221 ccagatggtc cagcaacaag gaaccttgaa ccctcagaac cctatgatcc tttcaagggc
  2281 ccagcttatg ccacagggcc agatgatggt gaaccccccg agccaaaatc ttgggccctc
  2341 gccccaaagg atgaccccac ccaagcagat gctttcccag cagggcccac aaatgatggc
  2401 gccacataac cagatgatgg ggcctcaggg gcaggttttg ctccaacaga acccaatgat
  2461 agagcagatt atgaccaatc aaatgcaggg gaataagcag cagtttaaca ctcagaacca
  2521 gtccaatgtc atgccgggac cagcccagat aatgagggga ccaactccaa acatgcaagg
  2581 aaatatggtg cagtttacgg gacagatgtc aggacagatg ctgccccagc aagggcctgt
  2641 gaacaacagt ccatctcagg ttatgggcat tcagggacag gtcctgcggc caccagggcc
  2701 cagcccacac atggcccagc agcatggtga tcctgctact acagcaaata acgatgtcag
  2761 tttatctcag atgatgcctg atgttagcat tcaacaaacc aacatggtcc cccctcatgt
  2821 gcaggccatg cagggaaaca gtgcctcggg aaaccacttc tcaggccatg ggatgtcttt
  2881 caatgcacct ttcagtggag ctcccaatgg aaatcagatg tcctgtggtc aaaatccagg
  2941 cttcccagtc aataaggatg tcacgctaac gagcccattg ttggtcaact tattgcagag
  3001 tgacatatct gcaggccatt ttggggtaaa caataagcaa aataatacca acgcaaataa
  3061 accgaagaag aagaaacccc ctcggaagaa gaaaaatagt cagcaagatc taaacacccc
  3121 agatactcgc ccagctggtc tggaagaggc tgatcagcca ccgttgcctg gagaacaagg
  3181 aattaacttg gataactcag gccctaaact gccagaattt tcaaaccggc caccaggtta
  3241 tccttctcaa ccagttgaac agaggccact tcagcagatg cctcctcaac tcatgcagca
  3301 tgtggcaccc ccaccacagc caccacagca gcagccacag ccacaactgc ctcagcagca
  3361 gcagccacca cctcccagtc agccacagtc tcagcagcag cagcagcagc agcaacaaat
  3421 gatgatgatg ctcatgatgc agcaggatcc caaatcagtt aggcttccag tctctcaaaa
  3481 tgtccatcct ccaaggggcc ccctgaaccc cgactcccag agaatgccca tgcaacagag
  3541 tggcagtgtg cctgtcatgg tcagtctgca aggacctgcc tccgtgccac catcacctga
  3601 taaacaaaga atgccaatgc ctgtgaatac tcccttggga agcaattcaa ggaaaatggt
  3661 ctatcaggag agcccgcaga atccttccag ctcgccactg gcggagatgg cctcactccc
  3721 tgaagcaagt ggcagtgaag caccatctgt cccaggaggc ccaaacaaca tgccttcaca
  3781 tgtagtactt ccccagaatc agttaatgat gacagggcca aaacctggac catcgcccct
  3841 ttcagcaact caaggtgcaa ctccccagca accccctgta aattccctgc ccagctctca
  3901 cggccaccac ttcccaaatg tggctgcgcc aacccagaca tctaggccca aaacaccaaa
  3961 cagagccagc cccagaccct attatcctca gacacccaac aaccgccctc ccagcacaga
  4021 accttcagaa atcagtctgt caccagaaag actcaatgcc tccatagcag gactcttccc
  4081 tccacagatt aatattcctt tacctcctag gccaaattta aacaggggct ttgatcaaca
  4141 aggcctaaat ccaacaactt tgaaggccat cgggcaagca ccttcaaatc ttaccatgaa
  4201 tccttccaat tttgctaccc cacaaactca caaattagat tctgtggtag tgaattctgg
  4261 aaagcagtct aattctggag caacaaaacg ggcaagtcca agcaacagtc gcaggtctag
  4321 tcctgggtcc agtaggaaaa ccactccaag ccctgggagg caaaattcaa aagcccctaa
  4381 acttactctg gcctctcaga caaatgcagc cctattgcag aatgtggagt tgccgagaaa
  4441 tgtattggtc agtcccactc ctctggccaa tccccctgta cctgggagct ttcctaacaa
  4501 cagtgggctg aatcctcaga attctactgt gtctgtggct gcagttgggg gtgttgttga
  4561 ggataacaag gagagcttga atgtgcctca ggacagtgat tgccagaatt cccagagtag
  4621 gaaggaacag gtaaacattg aactaaaagc agtccctgcc caagaagtta aaatggttgt
  4681 ccctgaagat cagtccaaaa aggatgggca gccttcggat cctaacaaac ttcccagtgt
  4741 cgaagagaac aaaaatttgg tgtctcctgc tatgagggaa gcaccaacat cgttaagtca
  4801 acttcttgac aactctggag ctcccaatgt gacaattaaa ccccctgggc ttacagatct
  4861 ggaagtaaca cctccagtag tttctgggga ggacctcaaa aaagcatctg tcattcccac
  4921 actgcaggat ctgtcttctt ctaaagaacc ttctaattcc ctaaacttac ctcacagtaa
  4981 tgagctgtgt tcatcccttg tgcatcccga attgagtgag gtcagttcta acgttgcacc
  5041 aagcatccct ccagtaatgt caagacctgt tagctcttcc tccatttcca ctcccttgcc
  5101 cccaaatcaa ataactgtat ttgtcacttc caatcccatc acaacttcag ctaacacatc
  5161 agcagctttg ccaactcact tgcagtctgc attgatgtca acagttgtca caatgcccaa
  5221 tgcgggtagc aaggttatgg tttctgaggg acagtcagct gctcagtcta atgcccggcc
  5281 tcagttcatt acacctgtct ttatcaattc atcctcaata attcaggtta tgaaaggatc
  5341 acagccaagc acaattcctg cagccccact gacaaccaac tctggcctga tgcctccctc
  5401 tgttgcagtt gttggccctt tacacatacc tcagaacata aaattttctt ctgctcctgt
  5461 accgcctaat gccctctcca gtagtcctgc tccaaacatc cagacaggtc gacctttggt
  5521 ccttagctca cgagccaccc ctgttcagct tccttcccct ccttgtacgt cttctccagt
  5581 tgtcccttct catccccctg tgcagcaagt gaaagaattg aatccagatg aggctagccc
  5641 tcaggtgaac acctcagcag atcagaacac tcttccctct tcacagtcaa ccacaatggt
  5701 ttctcccctt ttgaccaata gtccagggtc ctctggcaac cggcgaagcc cagtctcgtc
  5761 tagtaagggc aaaggaaaag tggacaaaat tggccaaatt ttttgacca aggcatgtaa
  5821 gaaagttaca ggctctcttg agaaagggga agaacaatat ggtgcagatg gagagactga
  5881 aggccaaggg ctagacacca cagctccggg gctcatggga acagagcagt tatccacaga
  5941 gctggacagt aaaaccccaa cgcccccagc acccactctg ctaaaaatga cctctagccc
  6001 tgtgggcccg ggcactgcct cagcaggacc cagcttacct ggcggtgctc tccccaccag
  6061 tgtacgctcg atagtaacca ctctggtacc ctccgagctc atctccgccg taccgaccac
  6121 aaaaagcaat catggtggca tagcatctga gtcacttgcg ggtggcctag tggaggagaa
  6181 ggtgggatcc catccagaac ttctacccag catagccccg tcgcagaatt tagtctcaaa
  6241 ggaaacttca accacagcac tgcaggcctc tgttgccaga ccagagctgg aggtaaatgc
  6301 tgccatagtc tctggacaaa gcagtgagcc caaagagata gttgaaaagt ccaaaatccc
  6361 aggccgaaga aactcccgaa ctgaagagcc aactgtggcc tctgaaagtg tggaaaatgg
  6421 acatcgtaaa cgatcttctc gacctgcttc agcctccagc tctactaaag acataaccag
  6481 tgcggtgcaa tccaagcgaa gaaaatccaa gtaaacaagc aggactgcga cttgatactt
  6541 ggaaatgtgt gtgactttta caaagagcaa ttttgagctg tgactttttt aaatcaattt
  6601 ctgtacagtt agtaatttta ataatgtggc ccttttccta gtccctgcaa cctgtttcat
  6661 aaagtgcaat ggggaaagca ggactgttga gcccttttgg tgttgcgagt tgaagttcaa
  6721 ggtttctaaa atgttgtctt gtattgaaag gagctaatgc cattataaat gttactagtt
  6781 ttcacatttc ctaagcagcc tagagtacag ggtgagcatt tttagatctc ctaatgatgt
  6841 attgtgccgt ggaagtactg tgtgtgaata gcagtagtgg gggcaaaagc aatcttctca
  6901 tttggaaatg ttgtaaataa ttttattata tagtgttttg gatgtatttg ttgtagaaat
  6961 ggaccagtga ataaagagaa tctaaggatt tgtacaatgt gaaataacgt gttaaataaa
  7021 tgtcattgtc atagaacata aagttatgtt attggtaagg gaaaaaaaaa a
PAGR1 (accession No. NM_024516):
(SEQ ID NO: 140)
        1 ggcgccgtgt ccgggtgtgg agaggggcgt cgtggaagcg agaagagtgg cccgtccctc
      61 tcctccccct ttccctcttt cggaaagtgg tttctgcggg gcccgggagc ctcggagtac
    121 cgaacctcga tctccggggc ggggtccttg gtggggactg agcgccccct cccggggacg
    181 ggcggtctgg ccgcggagtc ccctgcggga gcgtgattgg ctggaaacgg tcccgaaccc
    241 ccaggggagc ccgatccctg ggggaccctg gcttcggact ccagtatctg tcgtcgcagg
    301 gtccctgccc tagtggccta tgtcccttgc tcggggccat ggagacactg cggccagtac
    361 ggcggcgcct ctgtctgaag aaggggaagt gacctccggc ctccaggctc tggccgtgga
    421 ggataccgga ggcccctctg cctcggccgg taaggccgag gacgaggggg aaggaggccg
    481 agaggagacc gagcgtgagg ggtccggggg cgaggaggcg cagggagaag tccccagcgc
    541 tgggggagaa gagcctgccg aggaggactc cgaggactgg tgcgtgccct gcagcgacga
    601 ggaggtggag ctgcctgcgg atgggcagcc ctggatgccc ccgccctccg aaatccagcg
    661 gctctatgaa ctgctggctg cccacggtac tctggagctg caagccgaga tcctgccccg
    721 ccggcctccc acgccggagg cccagagcga agaggagaga tccgatgagg agccggaggc
    781 caaagaagag gaagaggaaa aaccacacat gcccacggaa tttgattttg atgatgagcc
    841 agtgacacca aaggactccc tgattgaccg gagacgcacc ccaggaagct cagcccggag
    901 ccagaaacgg gaggcccgcc tggacaaggt gctgtcggac atgaagagac acaagaagct
    961 ggaggagcag atccttcgta ccgggaggga cctcttcagc ctggactcgg aggaccccag
  1021 ccccgccagc cccccactcc gatcctccgg gagtagtctc ttccctcggc agcggaaata
  1081 ctgattccca ctgctcctgc ctctagggtg cagtgtccgt acctgctgga gcctgggccc
  1141 tccttcccca gcccagacat tgagaaactt gggaagaaga gagaaacctc aagctcccaa
  1201 acagcacgtt gcgggaaaga ggaagagaga gtgtgagtgt gtgtgtgtgt tttttctatt
  1261 gaacacctgt agagtgtgtg tgtgtgtttt ctattgaaca cctatagaga gagtgtgtgt
  1321 gttttctatt gaacatctat atagagagag tgtgtgagtg tgtgttttct attgaacacc
  1381 tattcagaga cctggactga attttctgag tctgaaataa aagatgcaga gctatcatct
  1441 cttaaaagga ggggctgtag ctgtagctca acagttaggc cccacttgaa gggagaggca
  1501 gaattgtact cacccagatt ggaaaatgaa agccagatgg gtagaggtgc cctcagttag
  1561 cacctgtccc atctcgggcc ctccaactcc tcccagtccc actccagtgc agccagctgg
  1621 ctccaaggta gaaacccatg agcactcagg gagcagtgtg ccttcagctg cagcagaagc
  1681 agcccggagg ataaaatgag aaccagctgc acacgggccc tttaactccc aagccccacc
  1741 cctgggcttg gcctgccttg ccctgccggg aagtgatccc caaggcaggg tgagagttcc
  1801 ccatctgagg cgtttgttgc agctacctgc acttctagat gtgagtacat tgtactagcc
  1861 ccccaaaccc caaatcaggg gcagatcttt gtatcccttg aggctctctt tagtcctgtc
  1921 ttgctttgaa gggccttgct tctgctgggg cagggaaaac atgtctgaat cagagtgggg
  1981 aaggaggatg ggtggtggct ttgcttttgg aggtttcact ttccaatagt tgggagtctt
  2041 ctgggttttg aagtaaaggc agattaacac caacaccggt cccccacccc cctgcaactc
  2101 tcaggcctct ctctgacttc agggtcccac ctgggaaatc aggtggggaa ccttacaggg
  2161 tcattcagac cccatcttag ccctagatcg gtgcttgctc tactcacctg cactgtcctg
  2221 gggacctggg ctctggcctg tcaccttgag ctccaagaat gtgacctgta cccattcagg
  2281 ccccttaact ctgacagatg agggtttctt actcctccat gcagggctgg gccagctgtt
  2341 ggtctcagtc gatcattcag gaagtcatta gcagagtgat ttccagaagg cgtagaattt
  2401 agtgaccaag gttctttcct ttttgggagg agaaagtgaa aactaggatg ctcagctgga
  2461 cccaccagcc tgagattctg gggattttag agctgtccct tggggagcca agcacttggg
  2521 ggtggaggtg atagcgaggc tgatggcccc tgtgttctca gctctctgcc tgggtagccc
  2581 ctgggtgatg ggggagaggc cagctgtcac gtggggtatc aggtggctct gccagaaact
  2641 cccttggcac acagagcact gggtcggccc tcgggtgtgg ctgtttgggc aggacagccc
  2701 tctgtatgta gccttgagca ggtagggggg ccaccttgag tgggtggccc agagacagcc
  2761 tcagggctcc aaggtaacgg ggtgctcagg ttatcttggg tgctgccctc ccaggttctg
  2821 ggggagcaga ggctgggcgc tggcccaact tacaggaaac actcaccttt gaactgccat
  2881 tagcaccatc tgggcagtac acagccccac ccaggtcctc tagttcttgt tctcggctta
  2941 gaatctttgt gtttctgcct gagaagccac tgcctcctag tttgtggtct ctacagttat
  3001 agccaggttg gacttccggc tccgtccttt gataactgtg tgctcttggg caaatttctt
  3061 aacttgcagg ttcttgtgag gataacatga gttaattgag ggcacttaac actacctggc
  3121 acagattaag ctcatctgaa gtgggagctg ttacttaggg gcgtttgcct agaacacagg
  3181 gtccagaggc tctctcccgg aaacttagac ccagtgagtc agaagtgagg cctgcaaaaa
  3241 gcagcaggag tggggttaag aattccagcc tagggctgga tgcggtggct caggcctgta
  3301 atcccagtac tttgggaggc ccgaatggga ggatggcttg aggccaggag ttccagacca
  3361 gcctgagcaa catagcgaga ccctgtctct gtttgtgtgt gtgtggttgg ggttttgttt
  3421 tttttttttt tttaaagaat tatagctcag tcctatgatt aggcaagttg agaaaatatt
  3481 gatgaagatc aggggtgctg aagcctggtt cctggggtcg cttctgatct aggcggttct
  3541 tgcctctggt gactggtgtt aattggcagg agtgggagga gggaggacaa gtggaagtct
  3601 aggctggctg agctgttctg tctcgaaaag ttcctaaaac tgtgctgctt taaaaaaaaa
  3661 aaaagtaatt tatgagacac attctcaatt tccattaatc atctcctaaa gggggtaaac
  3721 caggaagccg ctgggtgaaa acaggctgtt ggcaattcct gagtcatgtg acccattctc
  3781 taaagactag aatatttaac ttaaatcagt gagaaactct gtgaaaaaaa aaaaaaaaaa
  3841 aaa
PAXIP1 (accession No. NM_007349):
(SEQ ID NO: 141)
        1 cggggccggg cgccgccgcg gagcctcccg ggccgccgcg atcatgtcgg accaggcgcc
      61 caaagttcct gaggagatgt tcagggaggt caagtattac gcggtgggcg acatcgaccc
    121 gcaggttatt cagcttctca aggctggaaa agcgaaggaa gtttcctaca atgcactagc
    181 ctcacacata atctcagagg atggggacaa tccagaggtg ggagaagctc gggaagtctt
    241 tgacttacct gttgtaaagc cttcttgggt gattctgtcc gttcagtgtg gaactcttct
    301 gccagtaaat ggtttttctc cagaatcatg tcagattttt tttggaatca ctgcctgcct
    361 ttctcaggtg tcatctgaag acagaagtgc cctgtgggct ttggttacgt tctatggggg
    421 agattgccag ctaaccctca ataagaaatg cacgcatttg attgttccag agccaaaggg
    481 ggagaaatac gaatgtgctt taaagcgagc aagtattaaa attgtgactc ctgactgggt
    541 tctggattgc gtatcagaga aaaccaaaaa ggacgaagca ttttatcatc ctcgtctgat
    601 tatttatgaa gaggaagaag aggaagagga agaggaggag gaagtagaaa atgaggaaca
    661 agattctcag aatgagggta gtacagatga gaagtcaagc cctgccagct ctcaagaagg
    721 gtctccttca ggtgaccagc agttttcacc taaatccaac actgaaaaat ctaaagggga
    781 attaatgttt gatgattctt cagattcatc accggaaaaa caggagagaa atttaaactg
    841 gaccccggcc gaagtcccac agttagctgc agcaaaacgc aggctgcctc agggaaagga
    901 gcctgggttg attaacttgt gtgccaatgt cccacccgtc ccaggtaaca ttttgccccc
    961 tgaggtccgg ggtaatttaa tggctgctgg acaaaacctc caaagttctg aaagatcaga
  1021 aatgatagct acctggagtc cagctgtacg gacactgagg aatattacta ataatgctga
  1081 cattcagcag atgaaccggc catcaaatgt agcacatatc ttacagactc tttcagcacc
  1141 tacgaaaaat ttagaacagc aggtgaatca cagccagcag ggacatacaa atgccaatgc
  1201 agtgctgttt agccaagtga aagtgactcc agagacacac atgctacagc agcagcagca
  1261 ggcccagcag cagcagcagc agcacccggt tttacacctt cagccccagc agataatgca
  1321 gctccagcag cagcagcagc agcagatctc tcagcaacct tacccccagc agccgccgca
  1381 tccattttca cagcaacagc agcagcagca gcaagcccat ccgcatcagt tttcacagca
  1441 acagctacag tttccacagc aacagttgca tcctccacag cagctgcatc gccctcagca
  1501 gcagctccag ccctttcagc agcagcatgc cctgcagcag cagttccatc agctgcagca
  1561 gcaccagctc cagcagcagc agcttgccca gctccagcag cagcacagcc tgctccagca
  1621 gcagcagcaa cagcagattc agcagcagca gctccagcgc atgcaccagc agcagcagca
  1681 gcagcagatg caaagtcaga cagcgccaca cttgagtcag acgtcacagg cgctgcagca
  1741 tcaggttcca cctcagcagc ccccgcagca gcagcagcaa cagcagccac caccatcgcc
  1801 tcagcagcat cagctttttg gacatgatcc agcagtggag attccagaag aaggcttctt
  1861 attgggatgt gtgtttgcaa ttgcggatta tccagagcag atgtctgata agcaactgct
  1921 ggccacctgg aaaaggataa tccaggcaca tggcggcact gttgacccca ccttcacgag
  1981 tcgatgcacg caccttctct gtgagagtca agtcagcagc gcgtatgcac aggcaataag
  2041 agaaagaaag agatgtgtta ctgcacactg gttaaacaca gtcttaaaga agaagaaaat
  2101 ggtaccgccg caccgagccc ttcacttccc agtggccttc ccaccaggag gaaagccatg
  2161 ttcacagcat attatttctg tgactggatt tgttgatagt gacagagatg acctaaaatt
  2221 aatggcttat ttggcaggtg ccaaatatac gggttatcta tgccgcagca acacagtcct
  2281 catctgtaaa gaaccaactg gtttaaagta tgaaaaagcc aaagagtgga ggataccctg
  2341 tgtcaacgcc cagtggcttg gcgacattct tctgggaaac tttgaggcac tgaggcagat
  2401 tcagtatagt cgctacacgg cattcagtct gcaggatcca tttgccccta cccagcattt
  2461 agttttaaat cttttagatg cttggagagt tcccttaaaa gtgtctgcag agttgttgat
  2521 gagtataaga ctacctccca aactgaaaca gaatgaagta gctaatgtcc agccttcttc
  2581 caaaagagcc agaattgaag acgtaccacc tcccactaaa aagctaactc cagaattgac
  2641 cccttttgtg cttttcactg gattcgagcc tgtccaggtt caacagtata ttaagaagct
  2701 ctacattctt ggtggagagg ttgcggagtc tgcacagaag tgcacacacc tcattgccag
  2761 caaagtgact cgcaccgtga agttcctgac ggcgatttct gtcgtgaagc acatagtgac
  2821 gccagagtgg ctggaagaat gcttcaggtg tcagaagttc attgatgagc agaactacat
  2881 tctccgagat gctgaggcag aagtactttt ctctttcagc ttggaagaat ccttaaaacg
  2941 ggcacacgtt tctccactct ttaaggcaaa atatttttac atcacacctg gaatctgccc
  3001 aagtctttcc actatgaagg caatcgtaga gtgtgcagga ggaaaggtgt tatccaagca
  3061 gccatctttc cggaagctca tggagcacaa gcagaactcg agtttgtcgg aaataatttt
  3121 aatatcctgt gaaaatgacc ttcatttatg ccgagaatat tttgccagag gcatagatgt
  3181 tcacaatgca gagttcgttc tgactggagt gctcactcaa acgctggact atgaatcata
  3241 taagtttaac tgatggcgtc taggctgccg tgcatgtcga ctcctgcggt gcggggctgg
  3301 ctgtctggct ggcgaggagc tgctgcgctt ccttcacatg ctcttgtttt ccagctgctt
  3361 tcctggggga tcagactgtg aagcaggaag acagatataa taaatatact gcatcttttt
  3421 aagatgtgca attttattct gaggaaacat aaattatgtt ttgtattata tgactttaag
  3481 agcccacatt aggttttatg attcatttgc caggttttta aatgttttca caaaactgtt
  3541 acgggacttc aactagaaat aaaatggtgt aaataaagac cttgctatct ctaaattatg
  3601 gatgttaaag atttgaaatg ttttgtactt tgattatttt tatttcttat actctgtttt
  3661 cttttatatt gatatcttgc ccacatttta aataaatgta cttttgaact taaaaaaaaa
  3721 aaa
ASH1L (accession No. NM_018489):
(SEQ ID NO: 142)
        1 aggagtggaa ggttgagggg ggcgctaggc gcccttcgct ccctccctct ggaggagctg
      61 ccgccgccac cgccgccact ctgctgctgc cgccgccgcc gccgccgctc ccgccgccat
    121 tttgggttcg ctttgcggag gggagacgat cccagtctcg gttgcgggac ccgcctcccc
    181 tcagtttgcc ccctttagcc ttccaccttt cccttctcct ctctcgcatt tccgccagtc
    241 agcttacccg ctggccgcct cctgacaagc gggagggatc cgccgtggac ccagggaagc
    301 ggaggagcct ggcggccacc ccctcttccc cacttccctg cactctcatc gctctcggcc
    361 tcggcctcgg cctccgacac gagaaagatg ctggtttcga gttttggaga tccttgtttt
    421 ttatggaaca cagttctgta aaattttcat aagattcctt ggcaataaca tacgcttgtg
    481 atggacccta gaaatactgc tatgttagga ttgggttctg attccgaagg tttttcaaga
    541 aagagtcctt ctgccatcag tactggcaca ttggtcagta agagagaagt agagctagaa
    601 aaaaacacaa aggaggaaga ggaccttcgc aaacggaatc gagaaagaaa catcgaagct
    661 gggaaagatg atggtttgac tgatgcacag caacagtttt cagtgaaaga aacaaacttt
    721 tcagagggaa atttaaaatt gaaaattggc ctccaggcta agagaactaa aaaacctcca
    781 aagaacttgg agaactatgt atgtcgacct gccataaaaa caactattaa gcacccaagg
    841 aaagcactta aaagtggaaa gatgacggat gaaaagaatg aacactgtcc ttcaaaacga
    901 gacccttcaa agttgtacaa gaaagcagat gatgttgcag ccattgaatg ccagtctgaa
    961 gaagtcatcc gtcttcattc acagggagaa aacaatcctt tgtctaagaa gctgtctcca
  1021 gtacactcag aaatggcaga ttatattaat gcaacgccat ctactcttct tggtagccgg
  1081 gatcctgatt taaaggacag agcattactt aatggaggaa ctagtgtaac agaaaagttg
  1141 gcacagctga ttgctacctg tcctccttcc aagtcttcca agacaaaacc gaagaagtta
  1201 ggaactggca ctacagcagg attggttagc aaggatttga tcaggaaagc aggtgttggc
  1261 tctgtagctg gaataataca taaggactta ataaaaaagc caaccatcag cacagcagtt
  1321 ggattggtaa ctaaagatcc tgggaaaaag ccagtgttta atgcagcagt aggattggtc
  1381 aataaggact ctgtgaaaaa actgggaact ggcactacag cggtattcat taataaaaac
  1441 ttaggcaaaa agccaggaac tatcactaca gtaggactgc taagcaaaga ttcaggaaag
  1501 aagctaggaa ttggtattgt tccaggttta gtgcataaag agtctggcaa gaagttagga
  1561 cttggcactg tggttggact ggttaataaa gatttgggaa agaaattggg ttctactgtt
  1621 ggcctagtgg ccaaggactg tgcaaagaag attgtagcaa gttcagcaat gggattggtt
  1681 aataaggaca ttggaaagaa actaatgagt tgtcctttgg caggtctgat cagtaaagat
  1741 gccataaacc ttaaagccga agcactgctc cccactcagg aaccgcttaa ggcttcttgt
  1801 agtacaaaca tcaataatca ggaaagtcag gaactttctg aatccctgaa agatagtgcc
  1861 accagcaaaa cttttgaaaa gaatgttgta cggcagaata aagaaagcat attggaaaag
  1921 ttctcagtac gaaaagaaat cattaatttg gagaaagaaa tgtttaatga aggaacatgc
  1981 attcagcaag acagtttctc atccagtgaa aagggatctt atgaaacctc aaagcatgaa
  2041 aagcagcctc ctgtatattg cacttctccg gactttaaaa tgggaggtgc ttctgatgta
  2101 tctaccgcta aatccccatt cagtgcagta ggagaaagca atctcccttc cccatcacct
  2161 actgtatctg ttaatccttt aaccagaagt ccccctgaaa cttcttcaca gttggctcct
  2221 aatccattac ttttaagttc tactacagaa ctaatcgaag aaatttctga atctgttgga
  2281 aagaaccagt ttacttctga aagtacccac ttgaacgttg gtcataggtc agttggtcat
  2341 agtataagta ttgaatgtaa agggattgat aaagaggtaa atgattcaaa aactacccat
  2401 atagatattc caagaataag ctcttccctt ggaaaaaagc caagtttgac ttctgaatcc
  2461 agcattcata ctattactcc ttcagttgtt aacttcacta gtttatttag taataagcct
  2521 tttttaaaac tgggtgcagt atctgcatca gacaaacact gccaagttgc tgaaagccta
  2581 agtactagtt tgcagtccaa accattaaaa aaaagaaaag gaagaaaacc tcggtggact
  2641 aaagtggtgg caagaagcac atgccggtct ccaaaagggc tagaattaga aagatcagag
  2701 ctttttaaaa acgtttcatg tagctcacta tcaaatagta attctgagcc agccaagttt
  2761 atgaaaaaca ttggaccccc ttcatttgta gatcatgact tccttaaacg ccgattgcca
  2821 aagttgagca aatccacagc tccatctctt gctctcttag ctgatagtga aaaaccatct
  2881 cataagtctt ttgctactca caaactatcc tccagtatgt gtgtctctag tgaccttttg
  2941 tctgatattt ataagcccaa aagaggaagg cctaaatcta aggagatgcc tcaactggaa
  3001 gggccaccta aaaggacttt aaaaatccct gcttctaaag tgttttcttt acagtctaag
  3061 gaagaacaag aacccccaat tttacagcca gaaattgaaa tcccttcctt caaacaaggt
  3121 ctgtctgtgt ctccttttcc aaaaaagaga ggcaggccta agaggcaaat gaggtcacca
  3181 gtcaagatga agccacctgt actgtcagtg gctccatttg ttgccactga aagtccaagc
  3241 aagctagaat ctgaaagtga caaccataga agtagcagtg atttctttga gagcgaggat
  3301 caacttcagg atccagatga cctagatgac agtcataggc caagtgtctg tagtatgagt
  3361 gaccttgaga tggaaccaga taaaaaaatt accaagagaa acaatggaca attaatgaaa
  3421 acaattatcc gcaaaataaa taaaatgaag actttaaaga gaaagaaact gttgaatcag
  3481 attctttcaa gttctgtaga atcaagtaat aaagggaaag tgcaatccaa actccataat
  3541 acggtatcaa gtcttgctgc cacatttggc tctaaattgg gccaacagat aaatgtcagc
  3601 aagaaaggaa ccatttatat aggaaagaga agaggtcgca aaccaaaaac tgtcttaaat
  3661 ggtattcttt ctggtagtcc tactagcctt gctgttcttg agcaaacagc tcaacaggca
  3721 gctgggtcag cattaggaca gattcttccc ccattactgc cttcatctgc tagtagttct
  3781 gagattcttc catcacctat ttgctctcag tcttctggga ctagtggagg tcagagccct
  3841 gtaagtagtg atgcaggttt tgttgaaccc agttcagtgc catatttgca tttacactcc
  3901 agacagggca gtatgattca gactcttgca atgaagaagg cctcaaaggg gaggaggcgg
  3961 ttatctcctc ctactttgtt gccaaattct ccttcgcact tgagtgaact cacatctcta
  4021 aaagaagcta ctccttcccc aatcagtgag tctcatagtg atgagaccat tcccagtgat
  4081 agtggaattg gaacagataa taacagcaca tcagacaggg cagagaaatt ttgtgggcaa
  4141 aaaaagagga ggcattcttt tgagcatgtt tctctgattc cccctgaaac ctctacagtg
  4201 ctaagcagtc ttaaagaaaa acataaacac aaatgtaagc gcaggaatca tgattacctc
  4261 agctatgaca agatgaaaag gcagaaacga aaacggaaaa agaaatatcc ccagcttcga
  4321 aatagacagg atccagactt tattgcagag ctggaggaac taataagtcg cctaagtgaa
  4381 attcggatca ctcatcgaag tcatcatttt atcccccgag atcttctgcc aactatcttt
  4441 cgaatcaact ttaatagttt ctatacacat ccttctttcc ccttagaccc tttgcactac
  4501 attcgaaaac ctgacttaaa aaagaaaaga gggagacccc ctaagatgag ggaggcaatg
  4561 gctgaaatgc cttttatgca cagccttagt tttcctcttt ctagtactgg attctatcca
  4621 tcttatggta tgccttactc tccttcaccc cttacagctg ctcccatagg attaggttac
  4681 tatggaaggt atcctcccac tctttatcca cctcctccat ctccttcttt caccacgcca
  4741 cttccacctc cttcctatat gcatgctggt catttacttc tcaatcctgc caaataccat
  4801 aagaaaaagc ataagctact tcgacaggag gcctttctta caaccagcag gactcccctc
  4861 ctttccatga gtacctaccc cagtgttcct cctgagatgg cctatggttg gatggttgag
  4921 cacaaacaca ggcaccgtca caaacacaga gaacaccgtt cttctgaaca accccaggtt
  4981 tctatggaca ctggctcttc ccgatctgtc ctggaatctt tgaagcgcta tagatttgga
  5041 aaggatgctg ttggagagcg atataagcat aaggaaaagc accgttgtca catgtcctgc
  5101 cctcatctct ctccttcaaa aagcttaata aacagagagg aacagtgggt ccaccgagag
  5161 ccttcagaat ctagtccatt ggccttggga ttgcagacac ctttacagat tgactgttca
  5221 gaaagttctc caagcttatc ccttggagga ttcactccca actctgagcc agccagcagt
  5281 gatgaacata caaacctttt cacaagtgca ataggcagct gcagagtttc aaaccctaac
  5341 tccagtggcc ggaagaaatt aactgacagc cctggactct tttctgcaca ggacacttca
  5401 ctaaatcggc ttcacagaaa ggagtcactg ccttctaacg aaagggcagt acagactttg
  5461 gcaggctccc agccaacctc tgataaaccc tcccagcggc catcagagag cacaaattgt
  5521 agccctaccc ggaaaaggtc ttcatctgag agtacttctt caacagtaaa cggagttccc
  5581 tctcgaagtc caagattagt tgcttctggg gatgactctg tggatagtct gctgcagcgg
  5641 atggtacaaa atgaggacca agagcccatg gagaaaagta ttgatgctgt gattgcaact
  5701 gcctctgcac caccttcttc cagtccaggc cgtagccaca gcaaggaccg aaccctggga
  5761 aaaccagaca gccttttagt gcctgcagtc acaagtgact cttgcaataa tagcatctca
  5821 ctcctatctg aaaagttgac aagcagctgt tccccccatc atatcaagag aagtgtagtg
  5881 gaagctatgc aacgccaagc tcggaaaatg tgcaattacg acaaaatctt ggccacaaag
  5941 aaaaacctag accatgtcaa taaaatctta aaagccaaaa aacttcaaag gcaggccagg
  6001 acagggaata actttgtgaa acgtaggcca ggtcgacctc ggaaatgtcc ccttcaggct
  6061 gtcgtatcaa tgcaagcatt ccaggctgct cagtttgtca acccagaatt gaacagagac
  6121 gaggaaggag cagcactgca cctcagtcct gacacagtta cagatgtaat tgaggctgtt
  6181 gttcagagtg taaatctgaa cccagaacat aaaaaggggt tgaagagaaa aggttggcta
  6241 ttggaagaac agaccagaaa aaagcagaag ccattaccag aggaagaaga gcaagagaat
  6301 aataaaagct ttaatgaagc accagttgag attcccagtc cttctgaaac cccagctaaa
  6361 ccttctgaac ctgaaagtac cttgcagcct gtgctttctc tcatcccaag ggaaaagaag
  6421 cccccacgtc ccccaaagaa gaagtatcag aaagcagggc tgtattctga cgtttacaaa
  6481 actacagacc caaagagtcg attgatccaa ttaaagaaag agaagctgga gtatactcca
  6541 ggagagcatg aatatggatt atttccagcg cccattcatg ttggaaagta tctaagacaa
  6601 aagagaattg acttccagct tccttatgat atcctttggc agtggaaaca caatcagcta
  6661 tacaaaaagc cagatgtccc actatataag aaaattcgtt caaatgtcta cgttgatgtc
  6721 aaaccccttt ctggttacga agctaccacc tgtaactgta agaagccaga tgatgacacc
  6781 aggaagggct gtgttgatga ctgcctcaat agaatgatct ttgctgagtg ttcccccaac
  6841 acttgcccat gtggcgagca atgctgtaac cagaggatac agaggcatga atgggtgcaa
  6901 tgtctagaac gatttcgagc tgaggaaaaa ggttggggaa tcagaaccaa agagccccta
  6961 aaagctgggc agttcatcat tgaataccta ggggaggtcg tcagtgaaca ggagttcagg
  7021 aacaggatga ttgagcagta tcataatcac agtgaccact actgcctgaa cctggatagt
  7081 gggatggtga ttgacagtta ccgcatggga aatgaggccc gattcatcaa ccatagctgt
  7141 gacccaaatt gtgaaatgca gaaatggtct gttaatggag tataccggat tggactctat
  7201 gctcttaaag acatgccagc tgggactgaa ctcacttatg attataactt tcattccttc
  7261 aatgtggaaa aacagcaact ttgtaagtgt ggctttgaga aatgtcgagg aatcatcgga
  7321 ggcaagagtc agcgtgtgaa tggactcacc agcagcaaaa acagccagcc catggccaca
  7381 cacaaaaaat ctggacggtc aaaagagaag agaaagtcta agcacaagct gaagaaaagg
  7441 agaggccatc tctctgagga acccagtgaa aatatcaaca ccccaactag attgaccccc
  7501 caattacaga tgaagccaat gtccaatcgt gaaaggaact ttgtgttaaa gcatcatgta
  7561 ttcttggtcc gaaactggga gaagattcgt caaaaacagg aggaagtaaa gcacaccagt
  7621 gataatattc actcagcatc attatatacc cgttggaatg ggatctgccg agatgatggg
  7681 aatatcaagt ctgatgtctt catgacccag ttctctgccc tgcagacagc tcgatctgtt
  7741 cgaacaagac ggttggcagc tgcagaggaa aatattgaag tggctcgggc agcccgccta
  7801 gcccagatct tcaaagaaat ttgtgatggt atcatctctt ataaagattc ttcccggcaa
  7861 gcactggcag ctccactttt gaaccttccc ccaaagaaaa agaatgctga ttattatgag
  7921 aagatctctg atcccctaga tcttatcacc atagagaagc agatcctcac tggttactat
  7981 aagacagtgg aagcttttga tgctgacatg ctcaaagtct ttcggaatgc tgagaagtac
  8041 tatgggcgta aatccccagt tgggagagat gtttgtcgtc tacgaaaggc ctattacaat
  8101 gcccggcatg aggcatcagc ccagattgat gagattgtgg gagagacagc aagtgaggca
  8161 gacagcagtg agacctcagt ctctgaaaag gagaatgggc atgagaagga cgacgatgtt
  8221 attcgctgta tctgtggcct ctacaaggat gaaggtctca tgatccagtg tgacaagtgc
  8281 atggtatggc agcactgtga ttgtatggga gtgaactcag atgtggagca ctacctttgt
  8341 gagcagtgtg acccaaggcc tgtggacagg gaggttccca tgatccctcg gccccactat
  8401 gcccaacctg gctgtgtcta cttcatctgt ttgctccgag atgacttgct gcttcgtcag
  8461 ggtgactgtg tgtatctgat gagggatagt cggcgcaccc ctgatggcca cccggtccgt
  8521 cagtcctatc gactgttatc tcacattaac cgagataaac ttgacatctt tcgcattgag
  8581 aagctttgga agaatgaaaa agaggaacgg tttgcctttg gtcaccatta tttccgtccc
  8641 cacgaaacac accactctcc atcccgtcgg ttctatcata atgaactatt tcgggtgcca
  8701 ctctatgaga tcattccctt ggaggctgta gtggggacct gctgtgtgtt ggacctttat
  8761 acgtattgta aagggagacc caaaggagta aaggagcaag atgtgtacat ctgtgattat
  8821 cggcttgaca agtcagcaca cctgttttac aagatccacc ggaaccgcta tcctgtctgc
  8881 accaaaccct atgcttttga tcacttcccc aagaagctca ctcccaaaaa agatttctcg
  8941 cctcattacg tcccagacaa ctacaagagg aatggaggac gatcatcctg gaagtctgag
  9001 cgctcaaagc cacccctaaa agacttgggc caggaggatg atgctctacc cttgattgaa
  9061 gaggttctag ccagtcaaga gcaagcagcc aatgagatac ccagcctgga ggagccagaa
  9121 cgggaagggg ccactgctaa cgtcagtgag ggtgaaaaaa aaacagagga aagtagtcaa
  9181 gaaccccagt caacctgtac ccctgaggaa cgacggcata accaacggga acgactcaac
  9241 cagatcttgc tcaatctcct tgaaaaaatc cctggaaaaa atgccattga tgtgacctac
  9301 ttgctggagg aaggatcagg caggaaactg cgaaggcgta ctttgtttat cccagaaaac
  9361 agctttcgaa agtgaccctc aaagaatgag aacctcaagc atctgggatc cagtggagct
  9421 aatcagtcct gcctcctgct ctctgggtat agacaggggt gggaagggtc catctgggca
  9481 aggggaatgg ggccatgttg ttgacattag gtacttaata agccttggag ctagtggaga
  9541 gggagaggaa agggttctgt ccaagacagt tcaggttaat taattttctt ctccattgct
  9601 tcaccttaag ggttaataat gtagagagga gggaggacca cattgatgac cagaacctac
  9661 tggtacttta tagcatttgc cccaccccac agcttaggtt tttctgtcat cctcagatcc
  9721 cacaggcatt gcgaagaagc tgcttcctat acccaggtat aactcaaaat ccaaagggat
  9781 agggccagga tccctattcc taccccatct attctctgtt ggctccaaga gctaccccag
  9841 agaccttaaa cagaaacagt agctgaggct tcttcctaga tacctgacta gggaagtttg
  9901 tctctccttt cttgcccaac caggtcaaag taaaatgtga gttgacagct caaagcactt
  9961 gtaactgctg ccccctccct acctctactc cccaaaatgg aatcatggga tagggaaggc
10021 ccccatgggg tcagaagggc acggtagttc ttgcaattat ttttgtttta cccttcataa
10081 cctgtcaaac atattttttt ctaatgagaa agccaggccc ccgccagcac acatgctgtt
10141 tttaatgcgc tgtagttctt gtgtgtctgc tgtgctgtgc aaatggagat tcagttcaaa
10201 ataaaatcat ttaaaaacct acataaaaag aactctaaac ccacccctgc aacaaaagtc
10261 actacataaa ctgttcagca gtattcacct atcagagtat ttgttgtgag tatagattat
10321 caattgaaaa cactactctt gttttcttaa ttgtacagtt ttcaatgtcc ctttcttaaa
10381 gagacagtat atttctcttc acccctagcc catcttccct caccctcctg aatgacatca
10441 ggaggtatat ccagggtgtc tccttccttc ctactctctt gaccagaagt taacagacta
10501 tactgtctct ttaaaaataa aatttaaaaa gctttgttgt cttttcagac atacatatgc
10561 atatatgttt tagatgttct tataagagaa aagatggttt ttaaatgtgc caagttgtgt
10621 gtgtgtgtgt atatatatgt gtgtatgtgt gtgtatatat atatgtgtgt gtgtatatat
10681 atacacacac acacacacac ctgctgtgtg attggtaagc aatacaatag taaacatgtc
10741 cccattactt ttttctaata ttggaccaat gctgtcctaa ttgtacattt ccccttatgg
10801 tgacgatgct ctgactcgtt taggtagaca cattgaccac cttccattcc attaaatatt
10861 ttttcctttt tcccctttct gtgtcattct tgaggaaaaa acaaaagaga gaggggatgc
10921 caatgatccc cttgagcaga gaaaaagcaa aataaatatt ttattaaaga aaaaagagaa
10981 ttaagaaaat agtttggagt attttcttac tgtagagaag cactgtacat tactaagaga
11041 cctgggtata agatactcac atgtggagct ggaaaaatcg catgtccaag cccgtttgag
11101 tggtttcttt tgtttttcat tgcagggagt gggtgggagg gaggtgggac taggggcact
11161 ttgggggtct ccttttagtc aaaagcgaga aaatgacaag aaagagatta aaattcaatg
11221 tttcctttat agtgttaaac actaaaattt taaaaaagat gaaaaagaaa aaaaaacttt
11281 gtaaaatgcg agaacagaag caaaagacac tacgctctgt cattttatct ttcttttgtt
11341 gaaagactaa aaaaaaactg aaatgttttt tagacaatca aatgttaggt aagtgcaaaa
11401 acttgttttt tcttactggt gtagaaatta atgccttttt ttatttttca gttattttat
11461 aataacgaaa taaaaagaac cccccagctg ccaggcgggt tttggtgttt gaaatgcggg
11521 gcaaagcact acatcactgc aaatagatac agagttagtc tgcatgtctg taggctgtgt
11581 gattgcggaa aatataaatg ctgctaatat atttcctttt tacaaaagca tatctaaata
11641 gatgattgtt ttgatgttaa tctttgtaaa ttatgtatta ccaattttaa cattggatgt
11701 aattgcatac aaagcttgca tctcaatcct tgaaagtcta gtattaaatg gaaaaaactt
11761 ttcctaactg tggaaaaaaa aaaa
SMARCA2 (accession No. NM_003070):
(SEQ ID NO: 143)
        1 gcgtcttccg gcgcccgcgg aggaggcgag ggtgggacgc tgggcggagc ccgagtttag
      61 gaagaggagg ggacggctgt catcaatgaa gtcatattca taatctagtc ctctctccct
    121 ctgtttctgt actctgggtg actcagagag ggaagagatt cagccagcac actcctcgcg
    181 agcaagcatt actctactga ctggcagaga caggagaggt agatgtccac gcccacagac
    241 cctggtgcga tgccccaccc agggccttcg ccggggcctg ggccttcccc tgggccaatt
    301 cttgggccta gtccaggacc aggaccatcc ccaggttccg tccacagcat gatggggcca
    361 agtcctggac ctccaagtgt ctcccatcct atgccgacga tggggtccac agacttccca
    421 caggaaggca tgcatcaaat gcataagccc atcgatggta tacatgacaa ggggattgta
    481 gaagacatcc attgtggatc catgaagggc actggtatgc gaccacctca cccaggcatg
    541 ggccctcccc agagtccaat ggatcaacac agccaaggtt atatgtcacc acacccatct
    601 ccattaggag ccccagagca cgtctccagc cctatgtctg gaggaggccc aactccacct
    661 cagatgccac caagccagcc gggggccctc atcccaggtg atccgcaggc catgagccag
    721 cccaacagag gtccctcacc tttcagtcct gtccagctgc atcagcttcg agctcagatt
    781 ttagcttata aaatgctggc ccgaggccag cccctccccg aaacgctgca gcttgcagtc
    841 caggggaaaa ggacgttgcc tggcttgcag caacaacagc agcagcaaca gcagcagcag
    901 cagcagcagc agcagcagca gcagcagcaa cagcagccgc agcagcagcc gccgcaacca
    961 cagacgcagc aacaacagca gccggccctt gttaactaca acagaccatc tggcccgggg
  1021 ccggagctga gcggcccgag caccccgcag aagctgccgg tgcccgcgcc cggcggccgg
  1081 ccctcgcccg cgccccccgc agccgcgcag ccgcccgcgg ccgcagtgcc cgggccctca
  1141 gtgccgcagc cggccccggg gcagccctcg cccgtcctcc agctgcagca gaagcagagc
  1201 cgcatcagcc ccatccagaa accgcaaggc ctggaccccg tggaaattct gcaagagcgg
  1261 gaatacagac ttcaggcccg catagctcat aggatacaag aactggaaaa tctgcctggc
  1321 tctttgccac cagatttaag aaccaaagca accgtggaac taaaagcact tcggttactc
  1381 aatttccagc gtcagctgag acaggaggtg gtggcctgca tgcgcaggga cacgaccctg
  1441 gagacggctc tcaactccaa agcatacaaa cggagcaagc gccagactct gagagaagct
  1501 cgcatgaccg agaagctgga gaagcagcag aagattgagc aggagaggaa acgccgtcag
  1561 aaacaccagg aatacctgaa cagtattttg caacatgcaa aagattttaa ggaatatcat
  1621 cggtctgtgg ccggaaagat ccagaagctc tccaaagcag tggcaacttg gcatgccaac
  1681 actgaaagag agcagaagaa ggagacagag cggattgaaa aggagagaat gcggcgactg
  1741 atggctgaag atgaggaggg ttatagaaaa ctgattgatc aaaagaaaga caggcgttta
  1801 gcttaccttt tgcagcagac cgatgagtat gtagccaatc tgaccaatct ggtttgggag
  1861 cacaagcaag cccaggcagc caaagagaag aagaagagga ggaggaggaa gaagaaggct
  1921 gaggagaatg cagagggtgg ggagtctgcc ctgggaccgg atggagagcc catagatgag
  1981 agcagccaga tgagtgacct ccctgtcaaa gtgactcaca cagaaaccgg caaggttctg
  2041 ttcggaccag aagcacccaa agcaagtcag ctggacgcct ggctggaaat gaatcctggt
  2101 tatgaagttg cccctagatc tgacagtgaa gagagtgatt ctgattatga ggaagaggat
  2161 gaggaagaag agtccagtag gcaggaaacc gaagagaaaa tactcctgga tccaaatagc
  2221 gaagaagttt ctgagaagga tgctaagcag atcattgaga cagctaagca agacgtggat
  2281 gatgaataca gcatgcagta cagtgccagg ggctcccagt cctactacac cgtggctcat
  2341 gccatctcgg agagggtgga gaaacagtct gccctcctaa ttaatgggac cctaaagcat
  2401 taccagctcc agggcctgga atggatggtt tccctgtata ataacaactt gaacggaatc
  2461 ttagccgatg aaatggggct tggaaagacc atacagacca ttgcactcat cacttatctg
  2521 atggagcaca aaagactcaa tggcccctat ctcatcattg ttcccctttc gactctatct
  2581 aactggacat atgaatttga caaatgggct ccttctgtgg tgaagatttc ttacaagggt
  2641 actcctgcca tgcgtcgctc ccttgtcccc cagctacgga gtggcaaatt caatgtcctc
  2701 ttgactactt atgagtatat tataaaagac aagcacattc ttgcaaagat tcggtggaaa
  2761 tacatgatag tggacgaagg ccaccgaatg aagaatcacc actgcaagct gactcaggtc
  2821 ttgaacactc actatgtggc ccccagaagg atcctcttga ctgggacccc gctgcagaat
  2881 aagctccctg aactctgggc cctcctcaac ttcctcctcc caacaatttt taagagctgc
  2941 agcacatttg aacaatggtt caatgctcca tttgccatga ctggtgaaag ggtggactta
  3001 aatgaagaag aaactatatt gatcatcagg cgtctacata aggtgttaag accattttta
  3061 ctaaggagac tgaagaaaga agttgaatcc cagcttcccg aaaaagtgga atatgtgatc
  3121 aagtgtgaca tgtcagctct gcagaagatt ctgtatcgcc atatgcaagc caaggggatc
  3181 cttctcacag atggttctga gaaagataag aaggggaaag gaggtgctaa gacacttatg
  3241 aacactatta tgcagttgag aaaaatctgc aaccacccat atatgtttca gcacattgag
  3301 gaatcctttg ctgaacacct aggctattca aatggggtca tcaatggggc tgaactgtat
  3361 cgggcctcag ggaagtttga gctgcttgat cgtattctgc caaaattgag agcgactaat
  3421 caccgagtgc tgcttttctg ccagatgaca tctctcatga ccatcatgga ggattatttt
  3481 gcttttcgga acttccttta cctacgcctt gatggcacca ccaagtctga agatcgtgct
  3541 gctttgctga agaaattcaa tgaacctgga tcccagtatt tcattttctt gctgagcaca
  3601 agagctggtg gcctgggctt aaatcttcag gcagctgata cagtggtcat ctttgacagc
  3661 gactggaatc ctcatcagga tctgcaggcc caagaccgag ctcaccgcat cgggcagcag
  3721 aacgaggtcc gggtactgag gctctgtacc gtgaacagcg tggaggaaaa gatcctcgcg
  3781 gccgcaaaat acaagctgaa cgtggatcag aaagtgatcc aggcgggcat gtttgaccaa
  3841 aagtcttcaa gccacgagcg gagggcattc ctgcaggcca tcttggagca tgaggaggaa
  3901 aatgaggaag aagatgaagt accggacgat gagactctga accaaatgat tgctcgacga
  3961 gaagaagaat ttgacctttt tatgcggatg gacatggacc ggcggaggga agatgcccgg
  4021 aacccgaaac ggaagccccg tttaatggag gaggatgagc tgccctcctg gatcattaag
  4081 gatgacgctg aagtagaaag gctcacctgt gaagaagagg aggagaaaat atttgggagg
  4141 gggtcccgcc agcgccgtga cgtggactac agtgacgccc tcacggagaa gcagtggcta
  4201 agggccatcg aagacggcaa tttggaggaa atggaagagg aagtacggct taagaagcga
  4261 aaaagacgaa gaaatgtgga taaagatcct gcaaaagaag atgtggaaaa agctaagaag
  4321 agaagaggcc gccctcccgc tgagaaactg tcaccaaatc cccccaaact gacaaagcag
  4381 atgaacgcta tcatcgatac tgtgataaac tacaaagata ggtgtaacgt ggagaaggtg
  4441 cccagtaatt ctcagttgga aatagaagga aacagttcag ggcgacagct cagtgaagtc
  4501 ttcattcagt taccttcaag gaaagaatta ccagaatact atgaattaat taggaagcca
  4561 gtggatttca aaaaaataaa ggaaaggatt cgtaatcata agtaccggag cctaggcgac
  4621 ctggagaagg atgtcatgct tctctgtcac aacgctcaga cgttcaacct ggagggatcc
  4681 cagatctatg aagactccat cgtcttacag tcagtgttta agagtgcccg gcagaaaatt
  4741 gccaaagagg aagagagtga ggatgaaagc aatgaagagg aggaagagga agatgaagaa
  4801 gagtcagagt ccgaggcaaa atcagtcaag gtgaaaatta agctcaataa aaaagatgac
  4861 aaaggccggg acaaagggaa aggcaagaaa aggccaaatc gaggaaaagc caaacctgta
  4921 gtgagcgatt ttgacagcga tgaggagcag gatgaacgtg aacagtcaga aggaagtggg
  4981 acggatgatg agtgatcagt atggaccttt ttccttggta gaactgaatt ccttcctccc
  5041 ctgtctcatt tctacccagt gagttcattt gtcatatagg cactgggttg tttctatatc
  5101 atcatcgtct ataaactagc tttaggatag tgccagacaa acatatgata tcatggtgta
  5161 aaaaacacac acatacacaa atatttgtaa catattgtga ccaaatgggc ctcaaagatt
  5221 cagattgaaa caaacaaaaa gcttttgatg gaaaatatgt gggtggatag tatatttcta
  5281 tgggtgggtc taatttggta acggtttgat tgtgcctggt tttatcacct gttcagatga
  5341 gaagattttt gtcttttgta gcactgataa ccaggagaag ccattaaaag ccactggtta
  5401 ttttattttt catcaggcaa ttttcgaggt ttttatttgt tcggtattgt ttttttacac
  5461 tgtggtacat ataagcaact ttaataggtg ataaatgtac agtagttaga tttcacctgc
  5521 atatacattt ttccatttta tgctctatga tctgaacaaa agctttttga attgtataag
  5581 atttatgtct actgtaaaca ttgcttaatt tttttgctct tgatttaaaa aaaagttttg
  5641 ttgaaagcgc tattgaatat tgcaatctat atagtgtatt ggatggcttc ttttgtcacc
  5701 ctgatctcct atgttaccaa tgtgtatcgt ctccttctcc ctaaagtgta cttaatcttt
  5761 gctttctttg cacaatgtct ttggttgcaa gtcataagcc tgaggcaaat aaaattccag
  5821 taatttcgaa gaatgtggtg ttggtgcttt cctaataaag aaataattta gcttgacaaa
  5881 aaaaaaaaaa aa
SMARCA4 (accession No. NM_001128844):
(SEQ ID NO: 144)
        1 ggagaggccg ccgcggtgct gagggggagg ggagccggcg agcgcgcgcg cagcgggggc
      61 gcgggtggcg cgcgtgtgtg tgaagggggg gcggtggccg aggcgggcgg gcgcgcgcgc
    121 gaggcttccc ctcgtttggc ggcggcggcg gcttctttgt ttcgtgaaga gaagcgagac
    181 gcccattctg cccccggccc cgcgcggagg ggcgggggag gcgccgggaa gtcgacggcg
    241 ccggcggctc ctgcgtctcg cccttttgcc caggctagag tgcagtggtg cggtcatggt
    301 tcactgcagc ctcaacctcc tggactcagc aggaggccac tgtctgcagc tcccgtgaag
    361 atgtccactc cagacccacc cctgggcgga actcctcggc caggtccttc cccgggccct
    421 ggcccttccc ctggagccat gctgggccct agcccgggtc cctcgccggg ctccgcccac
    481 agcatgatgg ggcccagccc agggccgccc tcagcaggac accccatccc cacccagggg
    541 cctggagggt accctcagga caacatgcac cagatgcaca agcccatgga gtccatgcat
    601 gagaagggca tgtcggacga cccgcgctac aaccagatga aaggaatggg gatgcggtca
    661 gggggccatg ctgggatggg gcccccgccc agccccatgg accagcactc ccaaggttac
    721 ccctcgcccc tgggtggctc tgagcatgcc tctagtccag ttccagccag tggcccgtct
    781 tcggggcccc agatgtcttc cgggccagga ggtgccccgc tggatggtgc tgacccccag
    841 gccttggggc agcagaaccg gggcccaacc ccatttaacc agaaccagct gcaccagctc
    901 agagctcaga tcatggccta caagatgctg gccagggggc agcccctccc cgaccacctg
    961 cagatggcgg tgcagggcaa gcggccgatg cccgggatgc agcagcagat gccaacgcta
  1021 cctccaccct cggtgtccgc aacaggaccc ggccctggcc ctggccctgg ccccggcccg
  1081 ggtcccggcc cggcacctcc aaattacagc aggcctcatg gtatgggagg gcccaacatg
  1141 cctcccccag gaccctcggg cgtgcccccc gggatgccag gccagcctcc tggagggcct
  1201 cccaagccct ggcctgaagg acccatggcg aatgctgctg cccccacgag cacccctcag
  1261 aagctgattc ccccgcagcc aacgggccgc ccttcccccg cgccccctgc cgtcccaccc
  1321 gccgcctcgc ccgtgatgcc accgcagacc cagtcccccg ggcagccggc ccagcccgcg
  1381 cccatggtgc cactgcacca gaagcagagc cgcatcaccc ccatccagaa gccgcggggc
  1441 ctcgaccctg tggagatcct gcaggagcgc gagtacaggc tgcaggctcg catcgcacac
  1501 cgaattcagg aacttgaaaa ccttcccggg tccctggccg gggatttgcg aaccaaagcg
  1561 accattgagc tcaaggccct caggctgctg aacttccaga ggcagctgcg ccaggaggtg
  1621 gtggtgtgca tgcggaggga cacagcgctg gagacagccc tcaatgctaa ggcctacaag
  1681 cgcagcaagc gccagtccct gcgcgaggcc cgcatcactg agaagctgga gaagcagcag
  1741 aagatcgagc aggagcgcaa gcgccggcag aagcaccagg aatacctcaa tagcattctc
  1801 cagcatgcca aggatttcaa ggaatatcac agatccgtca caggcaaaat ccagaagctg
  1861 accaaggcag tggccacgta ccatgccaac acggagcggg agcagaagaa agagaacgag
  1921 cggatcgaga aggagcgcat gcggaggctc atggctgaag atgaggaggg gtaccgcaag
  1981 ctcatcgacc agaagaagga caagcgcctg gcctacctct tgcagcagac agacgagtac
  2041 gtggctaacc tcacggagct ggtgcggcag cacaaggctg cccaggtcgc caaggagaaa
  2101 aagaagaaaa agaaaaagaa gaaggcagaa aatgcagaag gacagacgcc tgccattggg
  2161 ccggatggcg agcctctgga cgagaccagc cagatgagcg acctcccggt gaaggtgatc
  2221 cacgtggaga gtgggaagat cctcacaggc acagatgccc ccaaagccgg gcagctggag
  2281 gcctggctcg agatgaaccc ggggtatgaa gtagctccga ggtctgatag tgaagaaagt
  2341 ggctcagaag aagaggaaga ggaggaggag gaagagcagc cgcaggcagc acagcctccc
  2401 accctgcccg tggaggagaa gaagaagatt ccagatccag acagcgatga cgtctctgag
  2461 gtggacgcgc ggcacatcat tgagaatgcc aagcaagatg tcgatgatga atatggcgtg
  2521 tcccaggccc ttgcacgtgg cctgcagtcc tactatgccg tggcccatgc tgtcactgag
  2581 agagtggaca agcagtcagc gcttatggtc aatggtgtcc tcaaacagta ccagatcaaa
  2641 ggtttggagt ggctggtgtc cctgtacaac aacaacctga acggcatcct ggccgacgag
  2701 atgggcctgg ggaagaccat ccagaccatc gcgctcatca cgtacctcat ggagcacaaa
  2761 cgcatcaatg ggcccttcct catcatcgtg cctctctcaa cgctgtccaa ctgggcgtac
  2821 gagtttgaca agtgggcccc ctccgtggtg aaggtgtctt acaagggatc cccagcagca
  2881 agacgggcct ttgtccccca gctccggagt gggaagttca acgtcttgct gacgacgtac
  2941 gagtacatca tcaaagacaa gcacatcctc gccaagatcc gttggaagta catgattgtg
  3001 gacgaaggtc accgcatgaa gaaccaccac tgcaagctga cgcaggtgct caacacgcac
  3061 tatgtggcac cccgccgcct gctgctgacg ggcacaccgc tgcagaacaa gcttcccgag
  3121 ctctgggcgc tgctcaactt cctgctgccc accatcttca agagctgcag caccttcgag
  3181 cagtggttta acgcaccctt tgccatgacc ggggaaaagg tggacctgaa tgaggaggaa
  3241 accattctca tcatccggcg tctccacaaa gtgctgcggc ccttcttgct ccgacgactc
  3301 aagaaggaag tcgaggccca gttgcccgaa aaggtggagt acgtcatcaa gtgcgacatg
  3361 tctgcgctgc agcgagtgct ctaccgccac atgcaggcca agggcgtgct gctgactgat
  3421 ggctccgaga aggacaagaa gggcaaaggc ggcaccaaga ccctgatgaa caccatcatg
  3481 cagctgcgga agatctgcaa ccacccctac atgttccagc acatcgagga gtccttttcc
  3541 gagcacttgg ggttcactgg cggcattgtc caagggctgg acctgtaccg agcctcgggt
  3601 aaatttgagc ttcttgatag aattcttccc aaactccgag caaccaacca caaagtgctg
  3661 ctgttctgcc aaatgacctc cctcatgacc atcatggaag attactttgc gtatcgcggc
  3721 tttaaatacc tcaggcttga tggaaccacg aaggcggagg accggggcat gctgctgaaa
  3781 accttcaacg agcccggctc tgagtacttc atcttcctgc tcagcacccg ggctgggggg
  3841 ctcggcctga acctccagtc ggcagacact gtgatcattt ttgacagcga ctggaatcct
  3901 caccaggacc tgcaagcgca ggaccgagcc caccgcatcg ggcagcagaa cgaggtgcgt
  3961 gtgctccgcc tctgcaccgt caacagcgtg gaggagaaga tcctagctgc agccaagtac
  4021 aagctcaacg tggaccagaa ggtgatccag gccggcatgt tcgaccagaa gtcctccagc
  4081 catgagcggc gcgccttcct gcaggccatc ctggagcacg aggagcagga tgagagcaga
  4141 cactgcagca cgggcagcgg cagtgccagc ttcgcccaca ctgcccctcc gccagcgggc
  4201 gtcaaccccg acttggagga gccacctcta aaggaggaag acgaggtgcc cgacgacgag
  4261 accgtcaacc agatgatcgc ccggcacgag gaggagtttg atctgttcat gcgcatggac
  4321 ctggaccgca ggcgcgagga ggcccgcaac cccaagcgga agccgcgcct catggaggag
  4381 gacgagctcc cctcgtggat catcaaggac gacgcggagg tggagcggct gacctgtgag
  4441 gaggaggagg agaagatgtt cggccgtggc tcccgccacc gcaaggaggt ggactacagc
  4501 gactcactga cggagaagca gtggctcaag gccatcgagg agggcacgct ggaggagatc
  4561 gaagaggagg tccggcagaa gaaatcatca cggaagcgca agcgagacag cgacgccggc
  4621 tcctccaccc cgaccaccag cacccgcagc cgcgacaagg acgacgagag caagaagcag
  4681 aagaagcgcg ggcggccgcc tgccgagaaa ctctccccta acccacccaa cctcaccaag
  4741 aagatgaaga agattgtgga tgccgtgatc aagtacaagg acagcagcag tggacgtcag
  4801 ctcagcgagg tcttcatcca gctgccctcg cgaaaggagc tgcccgagta ctacgagctc
  4861 atccgcaagc ccgtggactt caagaagata aaggagcgca ttcgcaacca caagtaccgc
  4921 agcctcaacg acctagagaa ggacgtcatg ctcctgtgcc agaacgcaca gaccttcaac
  4981 ctggagggct ccctgatcta tgaagactcc atcgtcttgc agtcggtctt caccagcgtg
  5041 cggcagaaaa tcgagaagga ggatgacagt gaaggcgagg agagtgagga ggaggaagag
  5101 ggcgaggagg aaggctccga atccgaatct cggtccgtca aagtgaagat caagcttggc
  5161 cggaaggaga aggcacagga ccggctgaag ggcggccggc ggcggccgag ccgagggtcc
  5221 cgagccaagc cggtcgtgag tgacgatgac agtgaggagg aacaagagga ggaccgctca
  5281 ggaagtggca gcgaagaaga ctgagccccg acattccagt ctcgaccccg agcccctcgt
  5341 tccagagctg agatggcata ggccttagca gtaacgggta gcagcagatg tagtttcaga
  5401 cttggagtaa aactgtataa acaaaagaat cttccatatt tatacagcag agaagctgta
  5461 ggactgtttg tgactggccc tgtcctggca tcagtagcat ctgtaacagc attaactgtc
  5521 ttaaagagag agagagagaa ttccgaattg gggaacacac gatacctgtt tttcttttcc
  5581 gttgctggca gtactgttgc gccgcagttt ggagtcactg tagttaagtg tggatgcatg
  5641 tgcgtcaccg tccactcctc ctactgtatt ttattggaca ggtcagactc gccgggggcc
  5701 cggcgagggt atgtcagtgt cactggatgt caaacagtaa taaattaaac caacaacaaa
  5761 acgcacagcc aaaaaaaaa
BPTF (accession No. NM_182641):
(SEQ ID NO: 145)
        1 cgccccccct gcgcccgccc ctcccccttc gctttccttc tccccccgcc tcggctccga
      61 catgaggggc cggcggggca ggccgcccaa gcagcccgcg gctcccgctg cggagcgctg
    121 cgccccggcc ccgccgccac cgccgccgcc gcccacgtcc ggacccatcg gggggctccg
    181 ctcgcggcac cgcggcagca gccggggcag gtgggccgcc gcccaggctg aggtggcgcc
    241 caagacgcgg ctgagctcgc ccaggggggg cagcagtagc cggaggaagc cgccgccgcc
    301 gccgccggcc ccccccagca ccagcgcccc gggccggggg gggcgaggag gcgggggcgg
    361 caggacgggg ggcgggggcg gcggcggcca cctggcccgg accaccgcgg cccggagggc
    421 cgtcaacaaa gtggtgtacg atgaccacga gagcgaggag gaggaggaag aggaggacat
    481 ggtctccgag gaggaggagg aggaggacgg cgacgccgag gagacccagg attctgagga
    541 cgacgaggag gatgagatgg aagaggacga cgatgactcc gattatccgg aggagatgga
    601 agacgacgac gacgacgcca gttactgcac ggaaagcagc ttcaggagcc atagtaccta
    661 cagcagcact ccaggtaggc gaaaaccaag agtacatcgg cctcgttctc ctatattgga
    721 agaaaaagac atcccgcccc ttgaatttcc caagtcctct gaggatttaa tggtgcctaa
    781 tgagcatata atgaatgtca ttgccattta cgaggtactg cggaactttg gcactgtttt
    841 gagattatct ccttttcgct ttgaggactt ttgtgcagct ctggtgagcc aagagcagtg
    901 cacactcatg gcagagatgc atgttgtgct tttgaaagca gttctgcgtg aagaagacac
    961 ttccaatact acctttggac ctgctgatct gaaagatagc gttaattcca cactgtattt
  1021 catagatggg atgacgtggc cagaggtgct gcgggtgtac tgtgagagtg ataaggagta
  1081 ccatcacgtt cttccttacc aagaggcaga ggactaccca tatggaccag tagagaacaa
  1141 gatcaaagtt ctacagtttc tagtcgatca gtttcttaca acaaatattg ctcgagagga
  1201 attgatgtct gaaggggtga tacagtatga tgaccattgt agggtttgtc acaaacttgg
  1261 ggatttgctt tgctgtgaga catgttcagc agtataccat ttggaatgtg tgaagccacc
  1321 tcttgaggag gtgccagagg acgagtggca gtgtgaagtc tgtgtagcac acaaggtgcc
  1381 tggtgtgact gactgtgttg ctgaaatcca aaaaaataaa ccatatattc gacatgaacc
  1441 tattggatat gatagaagtc ggaggaaata ctggttcttg aaccgaagac tcataataga
  1501 agaagataca gaaaatgaaa atgaaaagaa aatttggtat tacagcacaa aggtccaact
  1561 tgcagaatta attgactgtc tagacaaaga ttattgggaa gcagaactct gcaaaattct
  1621 agaagaaatg cgtgaagaaa tccaccgaca catggacata actgaagacc tgaccaataa
  1681 ggctcggggc agtaacaaat cctttctggc ggcagctaat gaagaaattt tggaatccat
  1741 aagagccaaa aagggagaca ttgataatgt taaaagccca gaagaaacag aaaaagacaa
  1801 gaatgagact gagaatgact ctaaagatgc tgagaaaaac agagaagaat ttgaagacca
  1861 gtcccttgaa aaagacagtg acgacaaaac accagatgat gaccctgagc aaggaaaatc
  1921 tgaggtaggt gatttcaaat cggagaagtc caacggggag ctaagtgaat ctcctggagc
  1981 tggaaaagga gcatctggct caactcgaat catcaccaga ttgcggaatc cagatagcaa
  2041 acttagtcag ctgaagagcc agcaggtggc agccgctgca catgaagcaa ataaattatt
  2101 taaggagggc aaagaggtac tggtagttaa ctctcaagga gaaatttcac ggttgagcac
  2161 caaaaaggaa gtgatcatga aaggaaatat caacaattat tttaaattgg gtcaagaagg
  2221 gaagtatcgc gtctaccaca atcaatactc caccaattca tttgctttga ataagcacca
  2281 gcacagagaa gaccatgata agagaaggca tcttgcacat aagttctgtc tgactccagc
  2341 aggagagttc aaatggaacg gttctgtcca tgggtccaaa gttcttacca tatctactct
  2401 gagactgact atcacccaat tagaaaacaa catcccttca tcctttcttc atcccaactg
  2461 ggcatcacat agggcaaatt ggatcaaggc agttcagatg tgtagcaaac ccagagaatt
  2521 tgcattggct ttagccattt tggagtgtgc agttaaacca gttgtgatgc taccaatatg
  2581 gcgagaatct ttaggacata ccaggttaca ccggatgaca tcaattgaaa gagaagaaaa
  2641 ggagaaagtc aaaaaaaaag agaagaaaca ggaagaagaa gaaacgatgc agcaagcgac
  2701 atgggtaaaa tacacatttc cagttaagca tcaggtttgg aaacaaaaag gtgaagagta
  2761 cagagtgaca ggatatggtg gttggagctg gattagtaaa actcatgttt ataggtttgt
  2821 tcctaaattg ccaggcaata ctaatgtgaa ttacagaaag tcgttagaag gaaccaaaaa
  2881 taatatggat gaaaatatgg atgagtcaga taaaagaaaa tgttcacgaa gtccaaaaaa
  2941 aataaaaata gagcctgatt ctgaaaaaga tgaggtaaaa ggttcagatg ctgcaaaagg
  3001 agcagaccaa aatgaaatgg atatctcaaa gattactgag aagaaggacc aagatgtgaa
  3061 ggagctctta gattctgaca gtgataaacc ctgcaaggaa gaaccaatgg aagtagacga
  3121 tgacatgaaa acagagtcac atgtaaattg tcaggagagt tctcaagtag atgtggtcaa
  3181 tgttagtgag ggttttcatc taaggactag ttacaaaaag aaaacaaaat catccaaact
  3241 agatggactt cttgaaagga gaattaaaca gtttacactg gaagaaaaac agcgactcga
  3301 aaaaatcaag ttggagggtg gaattaaggg tataggaaag acttctacaa attcttcaaa
  3361 aaatctctct gaatcaccag taataacgaa agcaaaagaa gggtgtcaga gtgactcgat
  3421 gagacaagaa cagagcccaa atgcaaataa tgatcaacct gaggacttga ttcagggatg
  3481 ttcagaaagt gattcctcag ttcttagaat gagtgatcct agtcatacca caaacaaact
  3541 ttatccaaaa gatcgagtgt tagatgatgt ctccattcgg agcccagaaa caaaatgtcc
  3601 gaaacaaaat tccattgaaa atgacataga agaaaaagtc tctgaccttg ccagtagagg
  3661 ccaggaaccc agtaagagta aaacaaaagg aaatgatttt ttcatcgatg actctaaact
  3721 agccagtgca gatgatattg gtactttgat ctgtaagaac aaaaaaccgc tcatacagga
  3781 ggaaagtgac accattgttt cttcttccaa gagtgcttta cattcatcag tgcctaaaag
  3841 taccaatgac agagatgcca cacctctgtc aagagcaatg gactttgaag gaaaactggg
  3901 atgtgactct gaatctaata gcactttgga aaatagttct gataccgtgt ctattcagga
  3961 tagcagtgaa gaagatatga ttgttcagaa tagcaatgaa agcatttctg aacagttcag
  4021 aactcgagaa caagatgttg aagtcttgga gccgttaaag tgtgagttgg tttctggtga
  4081 gtccactgga aactgtgagg acaggctgcc ggtcaagggg actgaagcaa atggtaaaaa
  4141 accaagtcag cagaagaaat tagaggagag accagttaat aaatgtagtg atcaaataaa
  4201 gctaaaaaat accactgaca aaaagaataa tgaaaatcga gagtctgaaa agaaaggaca
  4261 gagaacaagt acatttcaaa taaatggaaa agataataaa cccaaaatat atttgaaagg
  4321 tgaatgcttg aaagaaattt ctgagagtag agtagtaagt ggtaatgttg aaccaaaggt
  4381 taataatata aataaaataa tccctgagaa tgatattaaa tcattgactg ttaaagaatc
  4441 tgctataagg ccattcatta atggtgatgt catcatggaa gattttaatg aaagaaacag
  4501 ctccgaaaca aaatcgcatt tgctgagttc ttcagatgct gaaggtaact accgagatag
  4561 ccttgagacc ctgccatcaa ccaaagagtc tgacagtaca cagacgacca caccctcagc
  4621 atcttgtcca gaaagcaatt cagttaatca ggtagaagat atggaaatag aaacctcaga
  4681 agttaagaaa gttacttcat cacctattac ttctgaagag gaatctaatc tcagtaatga
  4741 ctttattgat gaaaatggtc tgcccatcaa caaaaatgaa aatgtcaatg gagaatctaa
  4801 aagaaaaacc gtcatcacag aagtcaccac gatgacctcc acagtggcca cagaatcaaa
  4861 aactgtgatc aaggtagaaa aaggcgataa gcaaactgtg gtttcttcca cagaaaattg
  4921 tgcaaaatcc actgtcacaa ccaccactac aacagtgacc aagctttcca caccctccac
  4981 aggcggcagt gtggacatca tctctgtaaa ggagcagagc aaaaccgtgg tcaccacgac
  5041 agtgacagac tccctgacca ccacgggagg cacactggtt acatctatga ctgtgagcaa
  5101 agagtattcc acacgagaca aagtgaaact gatgaaattt tcaagaccaa agaagactcg
  5161 ttcaggtaca gctctgccat cctatagaaa atttgttacc aagagcagca agaagagcat
  5221 ttttgttttg cctaatgatg acttaaaaaa gttggcccga aaaggaggaa tccgagaggt
  5281 cccttatttt aattacaatg caaaacctgc tttggatata tggccatatc cttctcctag
  5341 accgaccttt ggcatcactt ggaggtatag acttcagaca gtaaagtcct tagctggagt
  5401 gagcctgatg ttacggttac tgtgggcaag tttgagatgg gatgatatgg cggccaaggc
  5461 tcctccagga ggagggacta cacggacaga aacatccgaa actgaaatca caacaacaga
  5521 aataattaag aggagagatg ttggtcctta tggcattcga tctgaatatt gtatcaggaa
  5581 aatcatttgt cccattggag ttccagaaac accaaaagaa acgcctacac ctcagaggaa
  5641 aggccttcga tcaagtgcac tgcggccaaa gagaccagaa acgcccaagc aaactggccc
  5701 tgttattatt gaaacctggg tagcagaaga agaactggaa ttgtgggaga tcagggcatt
  5761 tgctgagaga gtggagaaag aaaaggcaca agcagttgag caacaggcta agaaacgact
  5821 ggagcagcag aagccgacag tgattgcaac ttccactact tccccaacaa gcagtacaac
  5881 cagcaccatc tctccagcac agaaggttat ggtggccccc ataagtggct cagttacaac
  5941 tggaaccaaa atggtactaa ctactaaagt tggatctcca gctacagtaa cattccaaca
  6001 aaacaagaac tttcatcaaa cctttgctac atgggttaag caaggccagt caaattcagg
  6061 cgttgttcaa gtacagcaga aagtcctggg tatcattcca tcaagtacag gtaccagtca
  6121 gcaaaccttt acttcattcc agcccaggac agcaacagtc acaattaggc ccaatacctc
  6181 aggctctgga ggaaccacaa gcaattcaca agtaatcaca gggcctcaga ttcgccctgg
  6241 tatgaccgtg attagaacac cactccaaca gtcaacacta ggaaaggcaa ttattcgaac
  6301 acctgtgatg gtacagccag gtgctcctca gcaagtgatg actcaaatca tcagggggca
  6361 gcctgtctcc actgcagtct ccgcccctaa cacggtttcc tcaacacctg ggcagaaaag
  6421 cttaacttca gcaacgtcca cttcaaatat acagtcttca gcctcacaac cccctcgccc
  6481 ccaacaagga caagtgaagc tcaccatggc tcaacttact cagttaacac agggccacgg
  6541 tggcaatcaa ggtttgacag tagtaattca aggacaaggt caaactactg gacagttgca
  6601 gttgatacct caaggggtga ctgtactccc aggcccaggc cagcagctaa tgcaagctgc
  6661 aatgccaaat ggtactgttc agcgattcct ctttacccca ttggcaacaa cagccaccac
  6721 agccagcacc accaccacca ctgtttccac gacagcagca ggtacaggtg aacaaaggca
  6781 gagtaaactg tcaccccaga tgcaggtaca tcaagacaaa accctgccac cagctcagtc
  6841 atcaagtgtg ggtccagcag aagcccagcc acagactgct cagccttcag ctcagcccca
  6901 gccccaaacc cagccccagt ccccagctca gcctgaagtt cagactcagc ctgaagttca
  6961 gacccaaaca actgtttcat cccatgtccc ttctgaagca caacccaccc acgcacagtc
  7021 atccaagccc caagttgcag cacagtctca gcctcaaagt aatgtccaag gacagtctcc
  7081 tgttcgtgtc caaagtccat cacagactcg aatacgtcca tcaactccat cccaactgtc
  7141 tcctggacaa caatcccagg ttcagactac aacctcacaa ccgattccaa ttcaaccaca
  7201 tacatctctt cagatacctt cccaaggcca gccacagtca caaccccagg tacagtcttc
  7261 aactcaaact ctttcatcag gacaaacttt aaatcaagtt actgtttcat ccccatcccg
  7321 tcctcagcta caaatacagc agccacagcc ccaagtcatt gctgtgcctc agctgcaaca
  7381 acaagtccag gttctctctc agatccagtc acaggttgtg gctcagatac aggctcagca
  7441 aagtggtgtg ccccagcaaa tcaaactcca gttacctatc caaattcagc aaagcagtgc
  7501 tgtgcagact caccagattc agaatgtggt tacagtgcag gcagccagtg tgcaagagca
  7561 gttgcaaagg gttcagcaac tcagggatca gcagcaaaag aagaaacagc aacagataga
  7621 aattaagcgt gaacacaccc tccaagcttc taatcaaagt gaaatcattc agaaacaggt
  7681 ggtgatgaag cataatgctg taatagaaca tttaaaacag aaaaagagca tgactccagc
  7741 tgaaagagaa gagaatcaaa gaatgattgt ctgtaaccag gtgatgaagt atattttgga
  7801 taagatagat aaagaagaaa aacaggcagc aaaaaaacgg aagcgtgaag agagtgtgga
  7861 gcagaaacgt agcaagcaga atgccactaa gctgtcagct ctgctcttca agcacaaaga
  7921 gcagctcaga gccgagatcc tgaagaagag agcactcctg gacaaggatc tgcaaattga
  7981 agtgcaggaa gagctgaaga gagacctgaa aattaagaaa gaaaaagacc tgatgcagtt
  8041 ggctcaggcc acagcagtag ctgcaccctg ccccccagtg acaccagctc ctccagcccc
  8101 tccagcccct ccaccttcac ctccccctcc acctgctgtg caacacacag gccttctgtc
  8161 cacgcccacc ttacctgctg cttcccagaa gaggaagcgg gaagaggaaa aagactccag
  8221 ctcaaagtcc aagaaaaaga aaatgatctc tactacctca aaggaaacta agaaggacac
  8281 aaagctttac tgtatctgta aaacgcctta tgatgaatct aaattttata ttggctgtga
  8341 tcggtgtcag aattggtacc atgggcgctg cgttggcatc ttgcaaagtg aggcagagct
  8401 cattgatgag tatgtctgtc cacagtgcca gtcaacagag gatgccatga cagtgctcac
  8461 gccactaaca gagaaggatt atgaggggtt gaagagggtg ctccgttcct tacaggccca
  8521 taagatggcc tggcctttcc ttgaaccagt agaccctaat gatgcaccag attattatgg
  8581 tgttattaag gaacctatgg accttgccac catggaagaa agagtacaaa gacgatatta
  8641 tgaaaagctg acggaatttg tggcagatat gaccaaaatt tttgataact gtcgttacta
  8701 caatccaagt gactccccat tttaccagtg tgcagaagtt ctcgaatcat tctttgtaca
  8761 gaaattgaaa ggcttcaaag ctagcaggtc tcataacaac aaactgcagt ctacagcttc
  8821 ttaaagttca gcgtgttaac ctaacataaa acacagcaag aatctggttg tctgaactat
  8881 tttaaattaa ggagccagat gtttttagtc aggctatcct gacaagactt gacctaaact
  8941 tcgtttttat tggtcataac agtccaatta tattcttggc caattttgtc caacggacaa
  9001 gaaaaaagca aagtcaacga caccattatc ttgtcaagat cagatggttt tactattgtg
  9061 gcagaagcga gaaaactttg tttattgaaa aaaaaagaaa aagaaagcaa gaaaaaaaga
  9121 tactatgggg tcaagtgtaa ctccatggaa atgccacgtc tgctcttcag tgaagaagct
  9181 ggtttagagt ctcacagaaa acttttgact gtatttattt attgttgcaa aaaagacgct
  9241 tttttattgc tgccctcatt tgtcagctaa ttattttttc ttataaaatc cagccccggt
  9301 tacatataat catctgtatc ttatcatgat tcctgtaggt aaaagtacaa gacgacctct
  9361 agatgtcttt tctttctatg aaaggagctg ctatgtacac atgtgcacac acacacaact
  9421 gggaatcaac aatgagttta ttgttcatgg tagattaaaa ttaagcttgc ataaaggttg
  9481 ggctaagtgg tcctggacta cagactctgt tgccttgaat ataacagtac aatttgtcaa
  9541 ttactctgca ccaggctaaa atgagtaaaa tctatttgaa ggtatcttgt ttgtaaacat
  9601 ttgtcagatt ctaatttttt tcttttgtat taaaattcaa ctatggatgt atatgaaaca
  9661 aaataaatgg agataatttt tctcccacag acagaggtgt ctttgaatgt gcgctaatga
  9721 ttatctgtaa gcctttgtgg ggagggaggc ctgcaaggtc atgaaaggca gaagagtcta
  9781 attgtgcctg gatttctcca ggacagcagt ggcccctcgt tttatcattc ccagtccatt
  9841 gtcatcacgt cagagaaaaa tcttcagggg tgctaatcct gttgcatcag ttgatcatac
  9901 taacgagaac ggtaatgcga caagatacac attgccttca tctgtacatt ctgtgatacc
  9961 aggcaaatta ccaattacac acagctactt atattttatg aagggcattt tttagatgac
10021 ctcatcctct gtgttatttg ttgattgggt ttgttttctg tttgttggtt tgtttgtttc
10081 ttccacgtaa ggaaaagtag tgtaaacagt agcgagaaaa tggaaaccac agaggaagat
10141 gtattttgca tgtttttcct ttcagtgttc ttacacgttg tatcactgca ttgtggtaat
10201 agcttctata aaatctgcca tagttggatt atgcagcttt gcaaaaattt ttactagatt
10261 ttgcactaac tcatattagc tttgtcctac caacttctgg aatttatcta attattgttt
10321 ttcaaagttt ctttcctttt aatgtttccc tgctatgcaa aacctttccc agacctcagt
10381 ttcttaaaag aaagatgttg ctacagttcc cgattctttc ttattacagg ctcaggtgta
10441 caggttattc tgggttaatt ttatctaatg aagcccattc ctttttgtac ataaagatgt
10501 cacttaaact tatgcttaca aactaaagac taatcgctca atatgaaaac atgaaaaaat
10561 ttttgcttaa agtattaaga tggaagtagt taaatatggg ttattttgtc cttttacttt
10621 tttaaaaaat gttacatatt gtatgcactg tgctgatgca agaattctac attttaatga
10681 gttataaaat tattctgcat ctcatcacgt cacagtattt ctgtactatt tattcatata
10741 tataaatata tatgggctta atcatttaaa atttgttgca gcaagaactt tcctacctgt
10801 aggcaataga ttgctatgtt tttaacaaat tgtggcaaat tctaaacagc aattcttttg
10861 tacgtaatag gacatttcat cctagaaaaa taaagtaatg tttttgacat tgga
SMARCA1 (accession No. NM_001282874):
(SEQ ID NO: 146)
        1 ggcctgagcg aaggggttgg aagcggagtg attccccacc cctgctccat ctagctcttt
      61 ccagtgcagc cactgccgcc gcccaggagc cctcgtcccc tgccttgtcc ccctactcgt
    121 tcccgctccc acggcatgga gcaggacact gccgcagtgg cagccaccgt ggcagccgcg
    181 gatgcgaccg ccactatcgt ggtcatagag gacgagcagc ccgggccgtc cacctctcag
    241 gaggagggag cggccgccgc ggccaccgaa gccaccgcgg ccacggagaa gggcgagaag
    301 aagaaggaga aaaacgtttc ttcatttcaa ctcaaacttg ctgctaaagc gcctaaatct
    361 gaaaaggaaa tggacccaga atatgaagag aaaatgaaag ccgaccgagc aaagagattt
    421 gaatttttac tgaagcagac agaacttttt gcacatttca ttcagccttc agcacagaaa
    481 tctccaacat ctccactgaa catgaaattg ggacgtcccc gaataaagaa agatgaaaag
    541 cagagcttaa tttctgctgg agactaccgc cataggcgca cagagcaaga agaagatgaa
    601 gagctactgt ctgagagtcg gaaaacatct aatgtgtgta ttagatttga ggtgtcacct
    661 tcatatgtga aaggggggcc actgagagat tatcagattc gaggactgaa ttggttgatc
    721 tctttatatg aaaatggagt caatggcatt ttggctgatg aaatgggcct tgggaaaact
    781 ttacaaacaa ttgctttgct tggttacctg aaacactacc gaaatattcc tggacctcac
    841 atggttttag ttccaaagtc tactttacac aactggatga atgaatttaa acgatgggtc
    901 ccatctctcc gtgtcatttg ttttgtcgga gacaaggatg ccagagctgc ttttattcgt
    961 gatgaaatga tgccaggaga gtgggatgtt tgcgttactt cttatgagat ggtaattaaa
  1021 gaaaaatctg tattcaaaaa gtttcactgg cgatacctgg tcattgatga agctcacaga
  1081 ataaagaatg aaaaatctaa gctttcagag attgttcgtg agttcaagtc gactaaccgc
  1141 ttgctcctaa ctggaacacc tttgcagaat aacctgcatg aactgtgggc cttactcaac
  1201 tttttattgc ctgatgtctt taattctgca gatgactttg attcttggtt tgacactaaa
  1261 aattgtcttg gtgatcaaaa actcgtggaa agacttcatg cagttttaaa accatttttg
  1321 ttacgccgta taaaaactga tgtagagaag agtctgccac ctaaaaagga aataaagatt
  1381 tacttggggc tgagtaagat gcaacgagaa tggtatacaa aaatcctgat gaaagatatt
  1441 gatgttttaa actcttctgg caagatggac aagatgcgac tcttaaacat tctgatgcag
  1501 cttcgaaagt gttgtaatca tccatatctg tttgatggtg ctgaacctgg tccaccttat
  1561 accactgatg agcatattgt cagcaacagt ggtaaaatgg tagttctgga taaactattg
  1621 gccaaactca aagaacaggg ttcaagggtt ctcattttca gccagatgac tcgcttgctg
  1681 gatattttgg aagattattg catgtggcgt ggttatgagt attgtcgact ggatggacaa
  1741 accccgcatg aagaaagaga ggataaattc ctagaagtgg aatttctggg tcaaagggaa
  1801 gcaatagagg cttttaatgc tcctaatagt agcaaattca tctttatgct aagtaccagg
  1861 gctggaggtc tcggaattaa cctggcaagt gctgatgtgg ttatactata tgattcagac
  1921 tggaacccac aggttgatct acaagctatg gatcgagcac atcgtattgg tcagaagaaa
  1981 ccagtacgtg tattccgtct catcactgac aacactgttg aagagaggat tgtagaaaga
  2041 gctgagataa aactgagact cgattcaatt gttatacaac aaggaagact cattgaccaa
  2101 cagtctaaca agctggcaaa agaggaaatg ttacaaatga tacggcatgg agccacccat
  2161 gtttttgctt ctaaagagag tgagttgaca gatgaagaca ttacaactat tctggaaaga
  2221 ggggaaaaga agactgcaga gatgaatgaa cgcctgcaaa aaatgggaga gtcttctcta
  2281 agaaatttta gaatggacat tgaacaaagt ttatacaaat ttgagggaga agattataga
  2341 gaaaaacaga agcttggcat ggtggaatgg attgaacctc ctaaacgaga acgcaaagca
  2401 aactacgcag tggatgccta ctttagagag gctttgcgtg tcagcgagcc aaagattcca
  2461 aaggctccac ggcctccaaa acagccaaat gttcaggatt ttcaattttt cccaccacgc
  2521 ttatttgagc tcctggaaaa ggaaattctt tattatcgga agacaatagg ctataaggtt
  2581 ccaaggaatc ctgatatccc aaatccagct ctggctcaaa gagaagagca aaaaaagatt
  2641 gatggagctg aacctcttac accagaagag actgaagaaa aggaaaaact tctcacacaa
  2701 ggtttcacaa actggactaa acgagatttt aaccagttta ttaaagctaa tgagaaatat
  2761 ggaagagatg acattgataa catagctcga gaggtagagg gcaaatcccc tgaggaggtc
  2821 atggagtatt cagctgtatt ttgggaacgt tgcaatgaat tacaggacat tgagaaaatt
  2881 atggctcaaa ttgaacgtgg agaagcaaga attcaacgaa ggatcagtat caagaaagcc
  2941 ctggatgcca aaattgcaag atacaaggct ccatttcatc agttgcgcat tcagtatgga
  3001 accagcaaag gaaagaacta tactgaggaa gaagatagat tcttgatttg tatgttacac
  3061 aaaatgggct ttgatagaga aaatgtatat gaagaattaa gacagtgtgt acgaaatgct
  3121 ccccagttta gatttgactg gtttatcaag tctaggactg ccatggaatt ccagagacgc
  3181 tgtaacactc tgatttcatt gattgagaaa gaaaatatgg aaattgagga aagagagaga
  3241 gcagaaaaga agaaacgggc aactaaaact ccaatgtcac agaaaagaaa agcagagtca
  3301 gctactgaga gctctggaaa gaaggatgtc aagaaggtga aatcctaaag cctagaaata
  3361 aagttttaaa tgggaaactg ctattttctt gttcccatct tcaaatgcta attgccagtt
  3421 ccagtgtatt catggtactc taagaaaaat ctctttggtt ttgatttctt gcatatttta
  3481 tatattttac aatgctttct acctgaaatg tgtagcttta tattttatgg cattctagta
  3541 tttttgtgta ctgtattttg tgcatttcat gtcttcatca aaatcctctc agtccttgtt
  3601 cttttgaagc ttgtgctgag gttttagctt ttctatgttt tatatgccgc tgctttgaaa
  3661 gagaacctag attctatagt tgtattattg ttgtttcata ctttaaattt atatggctgt
  3721 ggaaaaacga attaaaatgt tttgaggaga aagacttttt cacttctttg ttgctttctt
  3781 ttctattgag tctgggcttg tttgtgttac tgcatactgt gattagcata ataattgttt
  3841 ctttgaggtc atctaaatat ttttttccta aaggaataaa gggtgaggaa agaaaaatat
  3901 taaaaaagct aatatttgat actgtgcttg ctgtcagtat gcattacatt taaattattc
  3961 tctattcaag tgggaaaata taataaagaa atgtctataa gaaatttaaa aaaaaaaaaa
  4021 aaaaa
```

[0132] In some embodiments the therapeutic peptide to be expressed by the bacterial cell is caspase, such caspase 3 (for example, expressed in its activated form), or NIPP1.

### IV. Cancer Treatment

[0133] Bacteria such as Salmonella, Clostridium and Bifidobacterium have a natural tropism for cancers, such as solid tumors. Types of cancer that can be treated using the methods of the invention include, but are not limited to, solid tumors such as sarcomas and carcinomas (e.g., fibrosarcoma, myxosarcoma, liposarcoma, chondrosarcoma, osteogenic sarcoma, chordoma, angiosarcoma, endotheliosarcoma, lymphangiosarcoma, lymphangioendotheliosarcoma, synovioma, mesothelioma, Ewing's tumor, leiomyosarcoma, rhabdomyosarcoma, colon carcinoma, pancreatic cancer, breast cancer, ovarian cancer, prostate cancer, squamous cell carcinoma, basal cell carcinoma, adenocarcinoma, sweat gland carcinoma, sebaceous gland carcinoma, papillary carcinoma, papillary adenocarcinomas, cystadenocarcinoma, medullary carcinoma, bronchogenic carcinoma, renal cell carcinoma, hepatoma, bile duct carcinoma, choriocarcinoma, seminoma, embryonal carcinoma, Wilm's tumor, cervical cancer, uterine cancer, testicular cancer, lung carcinoma, small cell lung carcinoma, bladder carcinoma, epithelial carcinoma, glioma, astrocytoma, medulloblastoma, craniopharyngioma, ependymoma, pinealoma, hemangioblastoma, acoustic neuroma, oligodenroglioma, schwannoma, meningioma, melanoma, neuroblastoma, and retinoblastoma).

[0134] In some aspects, the subject is treated with radiation and chemotherapy before, after or during administration of the bacterial cells described herein.

### V. Administration

[0135] The invention includes administration of the attenuated Salmonella strains described herein and methods for preparing pharmaceutical compositions and administering such as well. Such methods comprise formulating a pharmaceutically acceptable carrier with one or more of the attenuated Salmonella strains described herein.

[0136] A pharmaceutical composition of the invention is formulated to be compatible with its intended route of administration. Solutions or suspensions used for parenteral, intradermal, or subcutaneous application can include the following components: a sterile diluent such as water for injection, saline solution, fixed oils, polyethylene glycols, glycerine, propylene glycol or other synthetic solvents; antioxidants such as ascorbic acid or sodium bisulfite; chelating agents such as ethylenediaminetetraacetic acid; buffers such as acetates, citrates or phosphates and agents for the adjustment of tonicity such as sodium chloride or dextrose. pH can be adjusted with acids or bases, such as hydrochloric acid or sodium hydroxide. The parenteral preparation can be enclosed in ampoules, disposable syringes or multiple dose vials made of glass or plastic.

[0137] For intravenous administration, suitable carriers include physiological saline, bacteriostatic water, Cremophor EL™ (BASF; Parsippany, N.J.) or phosphate buffered saline (PBS). It must be stable under the conditions of manufacture and storage and must be preserved against the contaminating action of other (undesired) microorganisms. The carrier can be a solvent or dispersion medium containing, for example, water, ethanol, polyol (for example, glycerol, propylene glycol, and liquid polyetheylene glycol, and the like), and suitable mixtures thereof. The proper fluidity can be maintained, for example, by the use of a coating such as lecithin, by the maintenance of the required particle size in the case of dispersion and by the use of surfactants. In many cases, it will be preferable to include isotonic agents, for example, sugars, polyalcohols such as mannitol, sorbitol, sodium chloride in the composition. Prolonged absorption of the injectable compositions can be brought about by including in the composition an agent which delays absorption, for example, aluminum monostearate and gelatin.

[0138] Injectable solutions can be prepared by incorporating the active compound in the required amount in an appropriate solvent with one or a combination of ingredients discussed above. Generally, dispersions are prepared by incorporating the active compound into a vehicle which contains a basic dispersion medium and various other ingredients discussed above. In the case of powders for the preparation of injectable solutions, the preferred methods of preparation are vacuum drying and freeze-drying which yields a powder of the active ingredient plus any additional desired ingredient from a previously.

[0139] Oral compositions generally include an inert diluent or an edible carrier. For example, they can be enclosed in gelatin capsules. For the purpose of oral therapeutic administration, the active compound can be incorporated with excipients and used in the form of tablets, troches, or capsules.

[0140] Pharmaceutically compatible binding agents, and/or adjuvant materials can be included as part of the composition. The tablets, pills, capsules, troches and the like can contain any of the following ingredients, or compounds of a similar nature: a binder such as microcrystalline cellulose, gum tragacanth or gelatin; an excipient such as starch or lactose, a disintegrating agent such as alginic acid, Primogel, or corn starch; a lubricant such as magnesium stearate or Sterotes; a glidant such as colloidal silicon dioxide; a sweetening agent such as sucrose or saccharin; or a flavoring agent such as peppermint, methyl salicylate, or orange flavoring.

[0141] For administration by inhalation, the bacteria are delivered in the form of an aerosol spray from a pressurized container or dispenser which contains a suitable propellant, e.g., a gas such as carbon dioxide, or a nebulizer.

[0142] Systemic administration can also be by transmucosal or transdermal means. For transmucosal or transdermal administration, penetrants appropriate to the barrier to be permeated are used in the formulation. Such penetrants are generally known in the art, and include, for example, for transmucosal administration, detergents, bile salts, and fusidic acid derivatives. Transmucosal administration can be accomplished through the use of nasal sprays or suppositories. For transdermal administration, the bacteria are formulated into ointments, salves, gels, or creams as generally known in the art.

[0143] It is especially advantageous to formulate compositions in dosage unit form for ease of administration and uniformity of dosage. Dosage unit form as used herein refers to physically discrete units suited as unitary dosages for the subject to be treated; each unit containing a predetermined quantity of active compound calculated to produce the desired therapeutic effect in association with the required pharmaceutical carrier. The specification for the dosage unit forms of the invention are dictated by and directly dependent on the unique characteristics of the active compound and the particular therapeutic effect to be achieved, and the limitations inherent in the art of compounding such an active compound for the treatment of individuals.

[0144] When administered to a patient the attenuated Salmonella can be used alone or may be combined with any physiological carrier. In general, the dosage ranges from about 1.0 c.f.u./kg to about 1×10¹² c.f.u./kg; optionally from about 1.0 c.f.u./kg to about 1×10¹⁰ c.f.u./kg; optionally from about 1.0 c.f.u./kg to about 1×10⁸ c.f.u./kg; optionally from about 1×10² c.f.u./kg to about 1×10⁸ c.f.u./kg; optionally from about 1×10⁴ c.f.u./kg to about 1×10⁸ c.f.u./kg; optionally from about 1×10⁵ c.f.u./kg to about 1×10¹² c.f.u./kg; optionally from about 1×10⁵ c.f.u./kg to about 1×10¹⁰ c.f.u./kg; optionally from about 1×10⁵ c.f.u./kg to about 1×10⁸ c.f.u./kg.

### EXAMPLES

[0145] The following examples are provided in order to demonstrate and further illustrate certain embodiments and aspects of the present invention and are not to be construed as limiting the scope thereof.

### Example I

### Introduction

[0146] Delivering protein drugs into the cytoplasm of cancer cells would expand the number of treatable cancer targets. More than 60% of the pathways that control cellular function are intracellular (1) and almost all are difficult to access. Intracellular pathways control most of the hallmarks of cancer (2) and have been the focus of a significant fraction of cancer research. Because of their specificity, protein biologics are excellent candidates for interfering with these pathways. However, bringing functional proteins across the cell membrane is technically challenging. Effective intracellular delivery, coupled with specific protein drugs, has the potential to provide new treatments for previously incurable cancers.

### Materials and Methods

### Bacterial Cultures

[0147] All bacterial cultures (both Salmonella and DH5α) were grown in LB (10 g/L sodium chloride, 10 g/L tryptone and 5 g/L yeast extract). Resistant strains of bacteria were grown in the presence of carbenicllin (100 μg/ml), chloramphenicol (33 μg/ml), kanamycin (50 μg/ml) and/or 100 μg/ml of DAP.

### Bacterial Strains and Plasmid Construction

[0148] Fifteen strains of Salmonella Enterica serovar Typhimurium were used throughout the experiments (Table S1). All plasmids contained a ColE1 origin and either chloramphenicol or ampicillin resistance (Table S2). All assembled DNA constructs were transformed into chemically competent DH5a E. Coli (New England Biolabs, Ipswich, MA) before electroporation into Salmonella. All cloning reagents, buffer reagents, and primers were from New England Biolabs, Fisher Scientific (Hampton, NH), and Invitrogen, (Carlsbad, CA), respectively, unless otherwise noted.

[0149] For electroporation, Salmonella cultures were grown to an optical density between 0.6 and 0.8, washed twice with 25 ml of ice-cold water, and resuspended in 400 μl ice cold water. DNA (200 ng for plasmids and 1-2 μg for linear DNA) was mixed with 50 μl of the bacterial suspension and electroporated in a 1 mm electroporation cuvette at 1,800V and 25 μF with a time constant of 5 msec.

[0150] The parental control strain (Par) was based on an attenuated therapeutic strain of Salmonella (VNP20009) that has three deletions, ΔmsbB, ΔpurI, and Δxyl that eliminate most toxicities in vivo. To enable balanced-lethal plasmid retention a strain was used (VNP200010) that has the asd gene deleted (1). A second strain (ΔflhD Par) was the basis for many strains in the study (Table S1). This strain was generated by first deleting flhD, then asd.

[0151] Genetic deletions were created using a modified lambda red recombination protocol (2). Salmonella were transformed with pkd46 (Yale CGSC E. Coli stock center) and grown from a single colony in 50 ml of LB. At an optical density of 0.1, arabinose was added to the bacterial cultures to a final concentration of 20 mM. When the optical density reached between 0.6 and 0.8, bacteria were centrifuged at 3000×g and washed twice with 25 ml ice-cold, ultrapure water (Millipore). The pelleted Salmonella were resuspended in 400 μl ice-cold water. A linear DNA segment was designed to insert an in-frame deletion into the gene (here flhD). It was generated by PCR amplification of FRT-KAN-FRT from plasmid pkd4 using primers vr121 and vr309 (Table S3). This PCR product contained kanamycin resistance flanked by FRT recombination sites and 50 base pair regions homologous to flhD. After electroporation, Salmonella recovered in LB for 2 hours at 37° C. and were left overnight at room temperature. This recovery solution was plated on kanamycin (50 μg/ml) agar plates and incubated at 37° C. until colonies formed. Colonies were screened for knockouts by colony PCR. Successful transformants were plated on kanamycin plates and grown overnight at 43° C. to eliminate pkd46 from the bacteria.

[0152] A similar process was used to delete asd. Transformants with successful deletion of flhD, were transformed with pkd46. A PCR product was created to insert an in-frame deletion into asd by PCR amplifying FRT-CHLOR-FRT from plasmid pkd3 using primers vr266 and vr268 (Table S3). This PCR product contained chloramphenicol resistance flanked by FRT recombination sites and 50 base pair regions homologous to asd. During recovery, electroporated bacteria were plated on agar containing 33 μg/ml chloramphenicol and 100 μg/ml diaminopimelic acid (DAP). Successful transformants were grown in the presence of chloramphenicol, kanamycin and DAP.

[0153] To generate the intracellular reporting strain of Salmonella, parental Salmonella strain (Par) was transformed with a plasmid containing PsseJ-GFP (plasmid P1; Table S2). The construction of this plasmid was initiated by first creating a promoter-less-GFP plasmid from pLacGFP and pQS-GFP [1]. The pQS-GFP plasmid contains chloramphenicol resistance, the ColE1 origin of replication, and the asd gene. Expression of ASD is necessary in Δasd strains and creates a balanced lethal system that maintains gene expression in vivo. The Plac-GFP gene circuit was amplified from plasmid pLacGFP with primers nd1 and nd2 (Table S4). The PCR product and the plasmid were digested with Aat2 and Pci1 and ligated with T4 DNA ligase (NEB, catalog #M0202S). The PsseJ promoter was amplified from the genome of SL1344 Salmonella using primers nd3 and nd4 (Table S4). This PCR product and the backbone plasmid were ligated after digestion with XbaI and Pci1.

[0154] A strain that re-expresses flhDC (flhDC Sal, Table S1) was created by transforming ΔflhD Salmonella with plasmid P2 (Table S2). Plasmid P2 was formed from temporary plasmid P3. Plasmid P3 was formed by amplifying flhDC from Salmonella genomic DNA using primers vr46 and vr47 (Table S4) and ligating it into plasmid PBAD-his-mycA (Invitrogen; catalog #V430-01). The PCR product was digested with NcoI, XhoI and DpnI (NEB, catalog #s R0193S, R0146S and R0176L). The PBAD-his-myc plasmid was digested with NcoI and XhoI and treated with calf intestinal phosphatase (NEB, catalog #M0290) for three hours. The PCR product was ligated into the plasmid backbone with T4 DNA ligase (NEB, catalog #M0202S).

[0155] The Plac-GFP-myc circuit was inserted into P3 by Gibson Assembly. (1) The insert (Plac-GFP-myc) was amplified from plasmid pLacGFP (1) using primers vr394 and vr395 (Table S4), which added homology regions to the backbone and added the myc tag. (2) The backbone plasmid (P3) was amplified using primers vr385 and vr386, which added homology to the insert. (3) Both PCR products were digested with DpnI for three hours, (4) and ligated by Gibson Assembly (HiFi master mix, NEB, catalog #E2621L). The gene for aspartate semialdehyde dehydrogenase (asd) gene was inserted by Gibson Assembly by amplifying asd from genomic Salmonella DNA using primers vr424 and vr425 and amplifying the plasmid backbone with primers vr426 and vr427.

[0156] A strain that re-expresses flhDC and produces GFP after invasion (flhDC reporting, Table S1) was created by transforming ΔflhD Salmonella with plasmid P4 (Table S2). The PsseJ-GFP-myc genetic circuit was amplified from P1 using primers vr269 and vr270, and the backbone of plasmid P3 was amplified using primers vr271 and vr272. The two PCR products were ligated by Gibson Assembly.

[0157] To generate the PsifA intracellular promoter-reporter strain, the PsifA promoter was cloned from Salmonella genomic DNA using primers nd5 and nd6 and inserted into P1 using XbaI and Pci1 creating plasmid P5. The PsifA reporter strain was created by transforming plasmid P5 into background Salmonella by electroporation. The generation of the PsseJ reporter strain is described above. To investigate lysis in Salmonella, lysis gene E (LysE) was put under control of PBAD. LysE was cloned using primers nd7 and nd8 and inserted into pBAD/Myc-His A (Invitrogen) using NcoI and KpnI to form plasmid P6.

[0158] Intracellular delivering (ID) Salmonella were created by cloning the Lysin E gene behind the PsseJ promoter. LysE was amplified using primers nd9 and nd10 and cloned into P1 using XbaI and Aat2. The Plac-GFP circuit was added to this plasmid by cloning it from plasmid pLacGFP using primers nd 11 and nd12 and inserting using SacI to create plasmid P7. This plasmid constitutively expresses myc-tagged GFP to identify bacteria in both live-cell and fixed-cell assays.

[0159] Genomic knockouts ΔsifA and ΔsseJ were created using the modified lambda red recombination protocol described in the creation of ΔflhD Salmonella above. Salmonella were transformed with pkd46. Linear DNA with homologous flanking regions was produced by PCR of plasmid pkd4 using primers vr432 and vr433 for ΔsseJ; and vr434 and vr435 for ΔsifA. After electroporation and recovery, colonies were screened for knockouts by colony PCR of the junction sites of the inserted PCR amplified products. Successful transformants were plated on kanamycin plates (50 μg/ml) and grown overnight at 43° C. to remove pkd46.

[0160] ID Salmonella that re-expresses flhDC (flhDC-ID Sal) was created by transforming ΔflhD with plasmids P8. Plasmid P8 was created by amplifying the Pssej-LysE gene circuit from P7 using primers vr398 and vr399 and ligating it into plasmid P2 using Gibson Assembly. The P2 backbone plasmid was amplified using primers vr396 and vr397.

[0161] A strain of ID Salmonella that constitutively expresses luciferase (ID Sal-luc; Table S1) was created by cloning Plac-luc from pMA3160 (Addgene) using primers ch1 and ch2. The P7 plasmid backbone was amplified with primers ch3 and ch4 and the pieces were ligated by Gibson Assembly to form plasmid P9 (Table S2).

[0162] To create ID Salmonella that express anti-b-actin nanobody (NB), PBAD inducible nanobody was cloned in place of flhDC in plasmid P8. The actin nanobody (Chromotek, catalog #acr) was amplified using primers vr466 and vr467. The delivery plasmid backbone was amplified using primers vr448 and vr449. The two PCR products were ligated by Gibson Assembly to create plasmid P10.

[0163] To create ID Salmonella that express the central domain of NIPP1 (NIPP1-CD), NIPP1-CD was cloned into plasmid pLacGFP. NIPP1-CD and the backbone plasmid were amplified using primers nd13-nd16 ligated by Gibson Assembly. The pLac-NIPP1-CD circuit was cloned using primers nd11 and nd17 (Table S4) and inserted into P7 using SacI to create plasmid P11.

[0164] To create ID Salmonella that intracellularly deliver CT caspase-3 (CT Casp-3), parental Salmonella were transformed with plasmid P12. This plasmid was created by PCR amplifying template DNA encoding for CT caspase-3 using primers, vr450 and vr451 from the constitutively two-chain (CT) caspase-3 encoding plasmid pC3D175CT. The pC3D175CT plasmid (Hardy Lab DNA archive Box 7, line 62) was constructed similarly to the caspase-6 CT expression construct [3] using Quikchange mutagenesis on a construct encoding full-length human caspase-3 in a pET23 expression vector (Addgene). Plasmid pC3D175CT encodes human caspase-3 residues 1-175, followed by a TAA stop codon, a ribosome binding sequence and the coding sequence for a start methionine and an inserted serine followed by the coding sequence for residues 176-286 with a six-histidine tag appended. The backbone of plasmid P8 was PCR amplified using primers vr448 and vr449 and the PCR products were ligated as previously described.

TABLE S1
Bacterial strains

| | Background/ | | Genetic | |
|---|---|---|---|---|
| Strain | Knockouts | Plasmid | functions | Description |
| Parental (Par) | ΔmsbB, ΔpurI, | — | — | Non-pathogenic therapeutic |
| | Δxyl, Δasd | | | Salmonella; deletion of asd |
| | | | | enables balanced lethal system to |
| | | | | maintain plasmids in vivo |
| ΔflhD | ΔfthD Par | — | — | Parental Salmonella with flhD |
| | | | | deletion; non-motile |
| Intracellular | Par | P1 | PsseJ-GFP | Intracellularly inducible GFP |
| reporting | | | | |
| flhDC Sal | ΔflhD Par | P2 | PBAD-flhDC | Re-expresses flhDC after |
| | | | Plac-GFP | induction with arabinose |
| | | | PBAD-flhDC | Re-expresses flhDC after |
| | | | | induction with arabinose |
| flhDC reporting | ΔfthD Par | P4 | PsseJ-GFP | Intracellularly inducible GFP |
| PsifA | Par | P5 | PsifA-GFP | Expresses GFP after activation of |
| | | | | PsifA promoter |
| PBAD-LysE | Par | P6 | PBAD-LysE | Bacteria lyse after activation with |
| | | | | arabinose |
| | | | PsseJ-LysE | Bacteria lyse after activation of |
| | | | | PsseJ promoter |
| ID Sal | Par | P7 | Plac-GFP | Constitutively expresses GFP |
| | | | | Predominantly accumulates in |
| | | | | the cytoplasm of cells |
| | | | PsseJ-LysE | Lyses after invasion |
| ΔsifA | ΔsifA Par | P7 | Plac-GFP | Constitutively expresses GFP |
| | | | | Predominantly accumulate in |
| | | | | SCVs |
| | | | PsseJ-LysE | Lyses after invasion |
| ΔsseJ | ΔsseJ Par | P7 | Plac-GFP | Constitutively expresses GFP |
| | | | Plac-GFP | Re-expresses flhDC after |
| | | | PBAD-flhDC | induction with arabinose |
| | | | | Lyses after invasion |
| flhDC-ID Sal | ΔflhD Par | P8 | PsseJ-LysE | Constitutively expresses GFP |
| | | | PsseJ-LysE | Bacteria lyse after activation of |
| | | | | PsseJ promoter |
| ID Sal-luc | Par | P9 | Plac-GFP | Constitutively expresses GFP |
| | | | Plac-luc | and luciferase |
| | | | | Lyses after invasion |
| | | | PsseJ-LysE | Controllably expresses nanobody |
| | | | PBAD-nano | against β-actin |
| NB | Par | P10 | Plac-GFP | Constitutively expresses GFP |
| | | | PsseJ-LysE | Lyses after invasion |
| | | | Plac-NIPP1 | Constitutively expresses NIPP1- |
| NIPP1-CD | Par | P11 | Plac-GFP | CD, and GFP |
| | | | PsseJ-LysE | |
| | | | PBAD- | Lyses after invasion |
| | | | Casp3 | Controllably expresses CT Casp |
| CT Casp-3 | Par | P12 | Plac-GFP | 3 Constitutively expresses GFP |

TABLE S2
Plasmids

| | | | Gene | Gene | |
|---|---|---|---|---|---|
| No. | Name | Origin | Maintenance | Circuits | Purpose |
| P1 | Intracellular | ColE1 | Chlor^{a} | PsseJ-GFP | Expresses GFP after cell |
| | reporting | | ASD^{b} | | invasion |
| P2 | flhDC re- | ColE1 | Amp | PBAD-flhDC | Re-expresses flhDC; |
| | expressing | | ASD | Plac-GFP-myc | Constitutively expresses |
| | | | | | GFP |
| P3 | PBAD-flhDC | ColE1 | Amp^{c} | PBAD-flhDC | Used in construction of |
| | | | | | P2 and P2B |
| P4 | flhDC reporting | ColE1 | Amp | PBAD-flhDC | Measures invasion after |
| | | | | PsseJ-GFP-myc | flhDC re-expression |
| P5 | PsifA reporter | ColE1 | Chlor | PsifA-GFP | Expresses GFP after |
| | plasmid | | ASD | | activation of PsifA |
| | | | | | promoter |
| P6 | Inducible lysis | ColE1 | Chlor | PBAD-LysE | Lyses after activation |
| | | | ASD | | with arabinose |
| P7 | Intracellular lysis | ColE1 | Chlor | PsseJ-LysE | Bacteria lyse after |
| | | | ASD | Plac-GFP-myc | invasion; Constitutively |
| | | | | | expresses GFP |
| P8 | Intracellular lysis | ColE1 | AMP | PsseJ-LysE | Lyses after invasion; |
| | and induced | | ASD | PBAD-flhDC | Re-expresses flhDC; |
| | invasion | | | Plac-GFP-myc | Constitutively expresses |
| | | | | | GFP |
| P9 | Luciferase | ColE1 | Chlor | PsseJ-LysE | Bacteria lyse after |
| | | | ASD | Plac-GFP-myc | invasion; Constitutively |
| | | | | Plac-luc | expresses GFP and |
| | | | | | luciferase |
| P10 | Nanobody | ColE1 | AMP | PsseJ-LysE | Lyses after invasion; |
| | | | ASD | PBAD-nano-flag | Expresses flag-tagged |
| | | | | | nanobody against β- |
| | | | | | actin |
| P11 | NIPP1-CD | ColE1 | Chlor | PsseJ-LysE Plac- | Lyses after invasion; |
| | | | ASD | NIPP1 | Expresses NIPP1-CD |
| P12 | CT Casp-3 | ColE1 | AMP | Plac-GFP | Lyses after invasion; |
| | | | ASD | PsseJ-LysE | Constitutively expresses |
| | | | | PBAD-Casp3 | GFP; Expresses CT Casp 3 |

^{a}Chloramphenicol
^{b}ASD (aspartate-semialdehyde dehydrogenase) is an essential enzyme for lysine synthesis and is necessary for the synthesis of peptidoglycan (4). It is the key gene in the balanced lethal system developed by Nakayama et al. (5) to maintain genes in Salmonella after injection in vivo.
^{c}Ampicillin

TABLE S4
Primers used for gene deletions

| Name | Primer sequence | Gene | Template |
|---|---|---|---|
| vr121 | FOFZCACGGGGTGCGGCTACGTCGCACAAA | flhD forward | pkd4 |
| | AATAAAGTTGGTTATTCTGGGTCTTGAGCG | | |
| | ATTGTGTAGGC (SEQ ID NO: 147) | | |
| vr309 | EOEFATCCTGAGTCAAACGGGTGATCGTCT | flhD reverse | pkd4 |
| | GATGATCGTCAAACCGGAAAAATTAGCCAT | | |
| | GGTCCATATGAATATC (SEQ ID NO: 148) | | |
| vr266 | FZEFAAAATGTTGGTTTTATCGGCTGGCGCG | asd forward | pkd3 |
| | GAATGGTCGGCTCTGTTCTGTCTTGAGCGAT | | |
| | TGTGTAGGC (SEQ ID NO: 149) | | |
| vr268 | OZFOGCCAACTGGCGCAGCATTCGACGCAG | asd reverse | pkd3 |
| | CGGCTCGGCGGCGCCCCATAAATTAGCCAT | | |
| | GGTCCATATGAATATC (SEQ ID NO: 150) | | |
| vr432 | FZEOCATTGAGTGTTGGACAGGGTTATTTCA | sseJ forward | pkd4 |
| | CATCATCTATCAGTTCTGAGTCTTGAGCGAT | | |
| | TGTGTAGGC (SEQ ID NO: 151) | | |
| vr433 | ZZFZTCAGTGGAATAATGATGAGCTATAAA | sseJ reverse | pkd4 |
| | ACTTTCTAACATTATGGCAAAATTAGCCAT | | |
| | GGTCCATATGAATATC (SEQ ID NO: 152) | | |
| vr434 | FZEOCGATTACTATAGGGAATGGTTTTTTAA | sifA forward | pkd4 |
| | AAAGTGAAATCCTTACCAAGTCTTGAGCGA | | |
| | TTGTGTAGGC (SEQ ID NO: 153) | | |
| vr435 | ZZFZAAAAAACAACATAAACAGCCGCTTTG | sifA reverse | pkd4 |
| | TTGTTCTGAGCGAACGTGTAAATTAGCCAT | | |
| | GGTCCATATGAATATC (SEQ ID NO: 154) | | |

TABLE S4
Primers used for plasmid construction

| Name | Sequence | Description |
|---|---|---|
| nd1 | AAAAAAACATGTGTGGAATTGTGAGCGGATAAC | PLac-GFP forward |
| | (SEQ ID NO: 155) | |
| nd2 | AAAAAAGACGTCTTATTTGTATAGTTCATCCATGC | PLac-GFP reverse |
| | C (SEQ ID NO: 156) | |
| nd3 | AAAAAAACATGTCACATAAAACACTAGCACTTT | PsseJ forward |
| | (SEQ ID NO: 157) | |
| nd4 | AAAAAATCTAGACCTCCTTACTTTATTAAACAC | PsseJ reverse |
| | (SEQ ID NO: 158) | |
| nd5 | AAAAAAACATGTTATAAGCGATTAATTGCGCAA | PsifA forward |
| | (SEQ ID NO: 159) | |
| nd6 | AAAAAATCTAGATAATCTCACTTATACTGGAGT | PsifA reverse |
| | (SEQ ID NO: 160) | |
| nd7 | AAAAAACCATGGTTTAAGAAGGAGATATACATAT | LysE forward (into |
| | GG (SEQ ID NO: 161) | PBAD) |
| nd8 | AAAAAAGGTACCTCACTCCTTCCGCACGTAATT | LysE reverse (into |
| | (SEQ ID NO: 162) | PBAD) |
| nd9 | AAAAAATCTAGATTTAAGAAGGAGATATACATAT | LysE forward |
| | GG (SEQ ID NO: 163) | |
| nd10 | AAAAAAGACGTCTCACTCCTTCCGCACGTAATT | LysE reverse |
| | (SEQ ID NO: 164) | |
| nd11 | AAAAAA GAGCTC GACTGGAAAGCGGGCAGTGA | Plac-GFP forward |
| | (SEQ ID NO: 165) | |
| nd12 | AAAAAA GAGCTC AAGCTTGCATGCCTGCAGGAG | Plac-GFP reverse |
| | (SEQ ID NO: 166) | |
| nd13 | TTTAAGAAGGAGATATACATATGGGTGGAGAGGA | NIPP1 forward |
| | TGATG (SEQ ID NO: 167) | |
| nd14 | CTTGCATGCCTGCAGGAGATTTACAGATCCTCTTC | NIPP1 forward |
| | TGAGATGAGTTTTTGTTCGTTCCGAAAGCGACCAA | |
| | C (SEQ ID NO: 168) | |
| nd15 | ATGTATATCTCCTTCTTAAATCTAGAGGTC (SEQ ID | pLacGFP backbone |
| | NO: 169) | forward |
| nd16 | GAACAAAAACTCATCTCAGAAGAGGATCTGTAAA | pLacGFP backbone |
| | TCTCCTGCAGGCATGCA (SEQ ID NO: 170) | reverse |
| nd17 | AAAAAAGAGCTCGTTAGCAATTTAACTGTGATAA | Plac-NIPP1-CD |
| | AC (SEQ ID NO: 171) | reverse |
| ch1 | TCAATCTCCTGCAGGCATGCTTTACACTTTATGCT | Luciferase forward |
| | TCCGGCTCGTATAATAAAAAAAAAAAAGGAGGAA | |
| | AAAAAATGGAAGATGCCAAAAACATTAAGAA | |
| | (SEQ ID NO: 172) | |
| ch2 | GGGGCGTAATTTGATATCAAGCTTTACACGGCGA | Luciferase reverse |
| | TCTTGCCG (SEQ ID NO: 173) | |
| ch3 | AGCTTGATATCAAATTACGCCCC (SEQ ID NO: 174) | P6 backbone forward |
| ch4 | GCATGCCTGCAGGAGATTGA (SEQ ID NO: 175) | P6 backbone reverse |
| vr46 | AAAAAACCATGGGTTAATAAAAGGAGGAATATAT | flhDC forward |
| | ATGCATACATCCGAGTTGCTAAAACA (SEQ ID NO: | |
| | 176) | |
| vr47 | AAAAAACTCGAGAAAAATTAAACAGCCTGTTCGA | flhDC reverse |
| | TCTGTTCAT (SEQ ID NO: 177) | |
| vr394 | CCGCATAGTTAAGCCAGTATACATTTACACTTTAT | pLacGFP backbone |
| | GCTTCCGGCTCGTATAATAAAAAAAAAAGGAGGA | forward |
| | AAAAAAATGAGTAAAGGAGAAGAACTTTTCA (SEQ | |
| | ID NO: 178) | |
| vr395 | TCACGTAGCGATAGCGGAGTTACAGATCCTCTTCT | pLacGFP backbone |
| | GAGATGAGTTTTTGTTCTTTGTATAGTTCATCCAT | reverse |
| | GCCAT (SEQ ID NO: 179) | |
| vr385 | CTCCGCTATCGCTACGTGA (SEQ ID NO: 180) | P3 backbone forward |
| vr386 | TGTATACTGGCTTAACTATGCGG (SEQ ID NO: 181) | P3 backbone reverse |
| vr424 | GCTTGTCTGCTCCCGGCATCGTACGTTTTCGTTCC | asd forward |
| | ATTGG (SEQ ID NO: 182) | |
| vr425 | AGACGGTCACAGCTTGTCTGTATCTGCGTTTACTC | asd reverse |
| | CTGTATTAC (SEQ ID NO: 183) | |
| vr426 | ACAGACAAGCTGTGACCGTCT (SEQ ID NO: 184) | backbone forward |
| vr427 | ATGCCGGGAGCAGACAAGC (SEQ ID NO: 185) | backbone reverse |
| vr269 | CGCAGCGAGTCAGTGAGCACATGTCACATAAAAC | Pssej-GFP-myc |
| | ACTAGCACT (SEQ ID NO: 186) | forward |
| vr270 | CGCACAGATGCGTAAGGAGAATTACAGATCCTCT | Pssej-GFP-myc reverse |
| | TCTGAGATGAGTTTTTGTTCTTTGTATAGTTCATCC | |
| | ATGCCATG (SEQ ID NO: 187) | |
| vr271 | GCTCACTGACTCGCTGCG (SEQ ID NO: 188) | P3 backbone reverse |
| vr272 | TTCTCCTTACGCATCTGTGCG (SEQ ID NO: 189) | P3 backbone forward |
| vr398 | ATCTGTGCGGTATTTCACACCACATGTCACATAAA | Pssej-LysE forward |
| | ACACTAGCACT (SEQ ID NO: 190) | |
| vr399 | TACTGAGAGTGCACCATATGCTCACTCCTTCCGCA | Pssej-LysE reverse |
| | CGTAATTT (SEQ ID NO: 191) | |
| vr396 | GCATATGGTGCACTCTCAGTA (SEQ ID NO: 192) | P2 backbone forward |
| vr397 | GGTGTGAAATACCGCACAGAT (SEQ ID NO: 193) | P2 backbone reverse |
| vr466 | GGGCTAACAGGAGGAATTAACCATGGCTCAGGTG | Actin nanobody |
| | CAGCTGG (SEQ ID NO: 194) | forward |
| vr467 | TACCAGCTGCAGATCTCGAGTTACTTGTCGTCATC | Actin nanobody |
| | GTCTTTGTAGTCCATGCTTCTTGAGGAGACGGTGA | reverse |
| | (SEQ ID NO: 195) | |
| vr448 | CTCGAGATCTGCAGCTGGTA (SEQ ID NO: 196) | P8 backbone forward |
| vr449 | GGTTAATTCCTCCTGTTAGCCC (SEQ ID NO: 197) | P8 backbone reverse |
| vr450 | GGGCTAACAGGAGGAATTAACCATGGACTACAAA | N-term FLAG-Casp |
| | GACGATGACGACAAGATGGAGAACACTGAAAACT | forward |
| | CAGTG (SEQ ID NO: 198) | |
| vr451 | TACCAGCTGCAGATCTCGAGTTACAGATCCTCTTC | C-term myc-Casp3 |
| | TGAGATGAGTTTTTGTTCGTGATAAAAATAGAGTT | reverse |
| | CTTTTGTGAG (SEQ ID NO: 199) | |

### Cell Culture

[0165] Four cancer cell lines were used: 4T1 murine breast carcinoma cells; Hepa1-6 murine hepatocellular carcinoma cells; MCF7 human breast carcinoma cells and LS174T human colorectal carcinoma cells (ATCC, Manassas, VA). All cancer cells were grown and maintained in Dulbecco's Minimal Eagle Medium (DMEM) containing 3.7 g/L sodium bicarbonate and 10% fetal bovine serum. For microscopy studies, cells were incubated in DMEM with 20 mM HEPES buffering agent and 10% FBS. To generate tumor spheroids, single cell suspensions of LS174T cells were transferred to PMMA-coated cell culture flasks (2 g/L PMMA in 100% ethanol, dried before use).

Salmonella Invasion into Cancer Cells In Vitro

[0166] To observe invasion into cancer cells, Salmonella were administered to mouse 4T1 breast cancer cells grown on coverslips using an invasion assay. The cells and bacteria were stained with phalloidin and anti-Salmonella antibodies and imaged with 100× oil immersion microscopy. The general procedures for invasion assays, immunocytochemistry, and microscopy are detailed in the following sections.

### Invasion Assays

[0167] For invasion assays, cancer cells were grown on coverslips for fixed-cell imaging or on well plates for live-cell imaging. For fixed imaging, glass coverslips were placed in 12-well plates and sterilized with UV light in a biosafety hood for 20 minutes. Mouse 4T1 or human MCF7 cells were seeded on the coverslips at 40% confluency and incubated overnight in DMEM. Concurrently, Salmonella were grown to an optical density (OD; at 600 nm) of 0.8. After incubation, the Salmonella were added to the 4T1 cultures at a multiplicity of infection (MOI) of 10 and allowed to infect the cells for two hours. After this invasion period, the cultures were washed five times with 1 ml of phosphate buffered saline (PBS) and resuspended in 2 ml of DMEM with 20 mM HEPES, 10% FBS and 50 μg/ml gentamycin. The added gentamycin removes extracellular bacteria. After six hours of incubation, the media was removed, and the coverslips were fixed with 10% formalin in PBS for 10 minutes.

[0168] A similar procedure was used for live-cell imaging. Cells were grown directly on well plates in DMEM (3.7 g/L sodium bicarbonate, 10% FBS) to a confluency between 30 and 50%. After growth to OD 0.8, Salmonella were added to the cell cultures at an MOI of 25 for 2 hours. After invasion, the cancer cells were washed five times with PBS, and 2 ml of DMEM with 50 μg/ml gentamycin was added to each well. Cells and bacteria were directly imaged microscopically.

### Immunocytochemistry

[0169] Immunocytochemistry was used to obtain detailed images of Salmonella invaded into cancer cells grown on coverslips. After fixing the coverslips with formalin, they were blocked with staining buffer (PBS with 0.1% Tween 20, 1 mM EDTA, and 2% bovine serum albumin [BSA]) for 30 minutes. The Tween 20 in this buffer selectively permeabilizes mammalian cell membranes, while leaving bacterial membranes intact.

[0170] After permeabilization, coverslips were stained to identify Salmonella, released GFP, vacuolar membranes and/or intracellular f-actin with (1) rabbit anti-Salmonella polyclonal antibody (Abcam, ab35156) or FITC-conjugated rabbit anti-Salmonella polyclonal antibody (Abcam, ab69253) (2) rat anti-myc monoclonal antibody (Chromotek, catalog #9e1-100), (3) rabbit anti-LAMP1 polyclonal antibody (Abcam, catalog #ab24170), and (4) Alexaflor-568-conjugated phalloidin (ThermoFisher, catalog #A12380), respectively. Three different staining combinations were used: (1) Salmonella alone; (2) Salmonella, released GFP and actin; and (3) Salmonella, released GFP and vacuoles.

[0171] For Salmonella alone staining (combination 1), coverslips were stained with FITC-conjugated anti-Salmonella antibody at 30° C. for one hour and washed three times with staining buffer.

[0172] For Salmonella, released GFP and actin staining (combination 2), coverslips were stained with anti-Salmonella and anti-myc primary antibodies at 30° C. for one hour, and washed twice times with staining buffer. Coverslips were incubated with secondary antibodies at a 1:200 dilution for one hour at 30° C.: Alexaflor-647 chicken anti-rabbit (ThermoFisher, catalog #A21443), Alexaflor-488 donkey anti-rat (ThermoFisher, catalog #A21208), and Alexaflor-568-conjugated phalloidin to identify Salmonella, GFP and intracellular f-actin, respectively.

For Salmonella, released GFP and vacuole staining (combination 3), coverslips were stained sequentially with anti-LAMP1 primary antibodies at 30° C. for one hour, and washed three times with staining buffer. Coverslips were incubated with Alexaflor-647 chicken anti-rabbit secondary antibodies (ThermoFisher, catalog #A21443) at a 1:200 dilution for one hour at 30° C. and washed four times with staining buffer. Coverslips were then stained with FITC-conjugated anti-Salmonella antibody and anti-myc primary antibody; and washed three times with staining buffer. Coverslips were incubated with Alexaflor-568 goat anti-rat secondary antibodies (ThermoFisher, A11077) at a 1:200 dilution for one hour at 30° C. to identify GFP.

[0173] After all staining, coverslips were washed three times with staining buffer and mounted to glass slides using 20 μl mountant with DAPI (ProLong Gold Antifade Mountant, ThermoFisher, catalog #P36962). Mounted coverslips were cured overnight at room temperature.

### Microscopy

[0174] Samples were imaged on a Zeiss Axio Observer Z.1 microscope. Fixed cells on coverslips were imaged with a 100× oil immersion objective (1.4 NA). Tumor sections were images with 10× and 20× objectives (0.3 and 0.4 NA, respectively). Time lapse fluorescence microscopy of live cells in well plates and tumor-chip devices were housed in a humidified, 37° C. environment and imaged with 5×, 10×, 63× or 100× objectives (0.2, 0.3, 1.4 and 1.4 NA, respectively). Fluorescence images were acquired with either 480/525 or 525/590 excitation/emission filters. All images were background subtracted and contrast was uniformly enhanced. Some image analysis was automated using computational code (MATLAB, Mathworks).

### Intracellular Salmonella in Tumors

[0175] To determine the fraction of tumor-colonized Salmonella that are intracellular, BALB/c mice with 4T1 tumors were injected with 2×10⁶ CFU of Intracellular reporting Salmonella (with PsseJ-GFP; Table S1). Ninety-six hours after bacterial injection, mice were sacrificed and tumors were excised, sectioned and stained as described in the Immunohistochemistry section below. Tumor sections were stained to identify Salmonella and GFP, which is produced by intracellular Salmonella. The fraction of intracellular Salmonella was determined by identifying Salmonella (n=1,258) in 8 images and determining the number that co-localize with GFP.

### Immunohistochemistry

[0176] Excised tumor sections were fixed in 10% formalin for 3 days. Fixed tumor samples were then stored in 70% ethanol for 1 week. Tumor samples were embedded in paraffin and sectioned into 5 μm sections. Deparaffinization was performed by washing the sectioned tissue three times in 100% xylene, twice in 100% ethanol, once in 95% ethanol, once in 70% ethanol, once in 50% ethanol, and once in DI water. Each wash step was performed for 5 minutes. Antigen retrieval was performed by incubating the tissue sections in 95° C., 20 mM sodium citrate (pH 7.6) buffer for 20 minutes. Samples were left in sodium citrate buffer until the temperature reduced to 40° C. Samples were then rehydrated with two quick (<1 minute) rinses in DI water followed by one five-minute wash in TBS-T.

[0177] Prior to staining, tissue sections were blocked with Dako blocking buffer (Dako, catalog #X0909) for one hour. Tissue sections were stained to identify Salmonella and GFP with 1:100 dilutions of (1) FITC-conjugated rabbit anti-Salmonella polyclonal antibody (Abcam, catalog #ab69253), and (2) either rat anti-myc monoclonal antibody (Chromotek, catalog #9e1-100) or rat anti-GFP monoclonal antibody (Chromotek, catalog #3h9-100) in Tris buffered saline with 0.1% Tween 20 (TBS-T) with 2% BSA (FisherScientific, catalog #BP9704-100). Sections were washed three times in TBS-T w/ 2% BSA and incubated with Alexaflor-568 goat anti-rat secondary antibodies (ThermoFisher, catalog #A11077). After washing sections three times with TBS-T, 40 μl of mountant with DAPI (ThermoFisher, catalog #P36962) and a cover slip were added to each slide. Slides were incubated at room temperature for 24 hours until the mountant solidified.

### Flow Cytometry Analysis of Bacterial Invasion in Tumors

[0178] Flow cytometry was used to identify cells in tumors that were invaded by Salmonella and the effect of inducing flhDC on invasion. The types of cells invaded by Salmonella was determined by isolating cells that contained invaded Salmonella and stratifying them into carcinoma, immune and other tumor-associated cells using EPCAM and anti-CD45 antibodies. The effect of inducing flhDC on cell invasion was determined by comparing mice administered flhDC-uninduced and flhDC-induced bacteria and counting the percentage of cells of the three cell types.

Two groups of mice were injected with 2×10⁶ CFU of flhDC Salmonella (Table S1) via the tail vein. To induce production from the PBAD-flhDC gene construct in the flhDC-induced group (n=9), 100 μg of arabinose in 400 μl PBS was administered by intraperitoneal (IP) injection at 48 and 72 hours after bacterial injection. The control, flhDC-uninduced group (n=8) received IP injections at the same times. Ninety-six hours after bacterial injection, mice were sacrificed, and tumors were excised and cut in half. Tumors were processed into single cell suspensions, stained, and analyzed by flow cytometry.

[0179] To create a single cell suspension from excised tumors, they were minced with a sterile razor blade in 5 ml of RPMI with 20 mM HEPES, 10% FBS, 1 mg/ml collagenase D (Roche, catalog #11088866001), 200 units/ml of DNAse I (Roche, catalog #04716728001), and 50 μg/ml of gentamicin (ThermoFisher, catalog #BP918-1) to prevent bacterial overgrowth/invasion. Once tumor pieces were less than 5 mm long, the tumor slurry was added to a 7 ml douncer and dounced ten times. The slurry was placed in a single well of a six well plate and incubated at 37° C. for two hours. To separate the cells, the suspension was filtered through a 40 μm cell strainer (ThermoFisher, catalog #22-363-547) and centrifuged for five minutes at 300×g. Red blood cells (RBCs) were lysed by incubating the single cell suspension with RBC lysis buffer (150 mM ammonium chloride, 12 mM sodium bicarbonate and 0.1 mM EDTA) for ten minutes. The cell suspensions were added to 10 ml of D-PBS (Hyclone, catalog #SH30256001) and spun at 300×g for 5 minutes.

[0180] Single cell suspensions were fixed in PBS containing 1 mM EDTA and 5% formaldehyde for ten minutes at room temperature. Fixed cells were spun at 600×g for five minutes and resuspended in blocking buffer for one hour. Blocking buffer is TBS-T with 2% BSA and 1 mM EDTA. The 0.1% Tween 20 permeabilizes the cancer cells but not the bacteria as described in the Immunocytochemistry section above. Cell suspensions were sequentially stained with FITC-conjugated anti-Salmonella antibody (Abcam, catalog #ab69253), PE dazzle 594 anti-CD326 (EpCAM; BioLegend, catalog #118236), and APC anti-CD45 (Biolegend, catalog #103112) at concentrations of 1:2000, 1:2000 and 1:1000, respectively. First, anti-Salmonella antibodies were added to cells for 45 minutes, followed by four washed six times with staining buffer (2% BSA, 1 mM EDTA and 0.1% Tween in PBS). Then EpCAM and anti-CD45 were added for 45 minutes, followed by two washes. Fluorescence minus one (FMO) of each sample were used as gating controls for each fluorophore. Samples were analyzed on a custom-built flow cytometer (dual LSRFortessa 5-laser, BD). All fluorophores were compensated with compensation beads (BD, catalog #552845) and did not carry more than 2% bleed over into any other channel. Cells were first identified if they contained intracellular Salmonella. Non-immune cells (cancer and other associated cells) were identified by samples stained with all antibodies except CD45 (i.e. FMO gating controls). Non-cancer cells (immune and other associated cells) were identified by samples stained with all antibodies except anti-EpCAM (CD326).

Effect of flhDC Induction on Bacterial Invasion into Cells in Culture

[0181] To determine the effect of expressing flhDC in bacterial invasion, 4T1 cells were grown on glass cover slips as described in the Infection assay section above. Inducible flhDC Salmonella (Table S1) were grown in LB with 20 mM arabinose to induce flhDC expression. Control (flhDC−) bacteria were grown without arabinose. Cancer cells were infected with both induced flhDC+ and flhDC− Salmonella at an MOI of 10 (n=4 for each condition). For the induced flhDC+condition, 20 mM arabinose was added to the mammalian culture to maintain expression. Eighteen hours after invasion, the cancer cells were stained to identify intracellular Salmonella (Salmonella alone, combination 1) as described in the Immunocytochemistry section above. Three images were acquired at 20× for each coverslip, for a total of 12 images per condition. Invasion was quantified by randomly identifying 20 cancer cells from the DAPI channel of each image. Each cell defined as invaded if Salmonella staining was co-localized with the nucleus or was within 10 μm of the nucleus. Invasion fraction was defined as the number of invaded cells over the total number of cells.

Effect of flhDC on Invasion into Tumor Masses In Vitro

[0182] To quantify invasion into tumor masses, engineered Salmonella were administered to tumor-on-a-chip devices developed in our laboratory (6, 7). Microfluidic tumor-on-a-chip devices were fabricated using negative tone photoresist and PDMS based soft lithography. Master chips were constructed by spin coating a layer of SU-8 2050 onto a silicon wafer at 1250 RPM for 1 minute. This speed corresponded to an SU-8 2050 thickness of 150 μm. The silicon wafer was baked at 65° C. for 5 minutes followed by 95° C. for 30 minutes. Microfluidic designs printed on a high-resolution transparency were placed over the silicon wafer in a mask aligner. The silicon wafer with the overlaid mask was exposed to UV light (22 J/cm²) for 22 seconds. Silicon wafers were baked for 5 minutes at 65° C. followed by 95° C. for 12 minutes. Wafers were then developed in PGMEA developing solution for 10 minutes and/or until microfluidic features were microscopically distinct with sharp and defined edges.

[0183] Soft lithography was used to create the multilayer tumor on a chip device with 12 tumor chambers (two conditions with six chambers each). PDMS (Sylgard 184) at ratios of 9:1 and 15:1 were used for the channel and valve layers, respectively. The channel layer was placed on a spin coater for 1 minute at 220 rpm in order to achieve a PDMS thickness of 200 μm. The silicon wafers were degassed for 45 minutes to eliminate air bubbles in the PDMS. The silicon wafers were baked at 65 degrees for approximately one hour or until both PDMS layers were partially cured. The top valve layer of PDMS was cut and removed from the silicon wafer and aligned on top of the channel layer using a stereomicroscope. The combined layers were baked for one hour at 95° C. in order to covalently bind the two layers. The multilayered PDMS device and a glass slide was plasma treated in a plasma cleaner (Harrick) for 2.5 minutes. Valves were pneumatically actuated with a vacuum pump and the PDMS was placed on the plasma treated glass slide. Valves were actuated until the device was ready for use.

[0184] The tumor-on-a-chip was sterilized with 10% bleach followed by 70% ethanol, each for one hour. Microfluidic chips were equilibrated with media (DMEM with 20 mM HEPES, pH 7.4) for one hour. Valve actuation was used to position tumor spheroids in the tumor chambers. Valves at the rear of the chambers were opened while the efflux channel was closed. After the tumor masses were positioned, the valves were reset so that the rear valves were closed and the influx and efflux channels were open.

[0185] Prior to administration to the device, flhDC reporting Salmonella (Table S1) were grown in LB with 20 mM arabinose to induce flhDC expression. These Salmonella have inducible flhDC (PBAD-flhDC) and produce GFP when intracellular (PsseJ-GFP). Control (flhDC−) Salmonella of the same strain were grown without arabinose. The bacteria were centrifuged and resuspended in culture medium (DMEM with 20 mM HEPES) at a density of 2×10⁷ CFU/ml. For the induced flhDC+ condition, 20 mM arabinose was added to the medium. Bacteria-containing media (flhDC+ and flhDC−; n=6 chambers each) were perfused through the tumor-on-a-chip devices for one hour at 3 μm/min for a total delivery of 2×10⁶ CFU to each device. Bacterial administration was followed by bacteria-free media (with 20 mM HEPES) for 48 hours.

[0186] Devices were imaged at 30-minute intervals. Invasion was quantified at 31 h by measuring GFP expression by invaded bacteria in the tumor masses. Regions of interest were defined around the borders of the tumor masses. The extent of invasion was determined as the average GFP fluorescence intensity in each tumor mass. Intensities were normalized by the intensity of the average tumor mass administered control (flhDC−) Salmonella.

### Intracellular Activation of the PsifA and PsseJ Promoters

[0187] Salmonella with GFP-reporting constructs for the PsifA and PsseJ promoters were grown in LB. These Intracellular reporting and PsifA strains contain constructs PsseJ-GFP and PsifA-GFP, respectively (Table S1). Both bacterial strains were administered to MCF7 cancer cells in six well plates at an MOI of 25 as described in the Invasion Assay section above. Live cells were imaged at 20× magnification, three hours after invasion. Images of extracellular bacteria were acquired in LB culture in six well plates at 20×. Extracellular promoter activity was determined as the average fluorescence intensity of bacteria from three wells each and normalized to the average intensity of PsseJ bacteria. The increase in promoter activity following cellular invasion was determined by averaging the fluorescence intensity of bacteria in cells in three wells and comparing it to the average intensity of extracellular bacteria.

### Bacterial Death Caused by Inducing Expression of Lysin E

[0188] Salmonella strain PBAD-LysE (Table S1) was grown in LB in 3 ml culture tubes to an average OD of 0.25. OD was measured every 30 minutes for three hours. After 90 minutes of growth, three of the cultures were induced with 10 mM arabinose. Arabinose was not added to three control cultures. Growth and death rates were determined by fitting exponential functions to bacterial density starting at time zero (for growth) and 90 minutes (for bacterial death).

### Intracellular Lysis and GFP Delivery

[0189] To visualize and quantify triggered intracellular lysis and GFP delivery, ID Salmonella were administered to cancer cells on coverslips and in well plates as described in the Invasion Assay section above. ID Salmonella constitutively express GFP (Plac-GFP) and express Lysin E after activation of PsseJ (PsseJ-LysE).

[0190] To quantify the extent and rate of lysis, ID Salmonella were administered to MCF7 cancer cells at an MOI of 25. Parental Salmonella that constitutively express GFP (transformed with plasmid pLacGFP) were used as controls. Transmitted-light images of cancer cells and fluorescent images of bacteria were acquired at 20× every 30 minutes for 10 hours. From three wells, 200 cancer cells were randomly selected from the first transmitted image for each condition. Over the time of the experiment, cells were scored if any bacteria invaded and when these intracellular bacteria lysed. The lysis fraction was defined as the number of cells with lysed bacteria over the total number of observed cells. The rate of intracellular lysis was determined by binning the number of cells with lysed bacteria per hour and fitting an exponential function to the cumulative fraction of cells with lysed bacteria.

[0191] The comparison of growth and death rates were (1) the growth rate of parental Salmonella in LB, (2) the growth rate of PBAD-LysE Salmonella in LB, (3) the death rate of PBAD-LysE Salmonella after induction with arabinose, (4) the growth rate of Pssei-LysE Salmonella in LB, and (5) the lysis (death) rate of Pssei-LysE Salmonella after invasion into cancer cells.

[0192] To generate images of bacterial lysis and GFP delivery, ID Salmonella were administered to 4T1 cancer cells grown on coverslips at an MOI of 10. After six hours, the coverslips were fixed and stained for Salmonella and released GFP (antibody combination #2) as described in the Immunocytochemistry section above. Images were acquired at 100× with oil immersion.

### Bacterial Protein Content

[0193] To quantify the amount of produced GFP, ID Salmonella (Table S1) were grown in LB. The bacteria were centrifuged, washed and resuspended at four densities: 10⁶, 10⁷, 10⁸, and 10⁹ bacteria per 40 μl Laemmli buffer, which lysed the bacteria. A GFP standard was loaded at three concentrations: 1, 10 and 100 ng per 40 μl Laemmli buffer. Samples were boiled and loaded onto NuPAGE 4-12% protein gels (Invitrogen, catalog #NPO0321BOX) in MOPS buffer. Resolved gels were transferred to PVDF blotting paper. Membranes were blocked with 2% bovine serum albumin in Tris-buffered saline with 5% skim milk powder and 0.1% Tween 20 (TBST+milk) for 1 hour. Blots were incubated with rat anti-GFP monoclonal antibody (Chromotek, catalog #3h9-100) primary antibody in TBST+milk overnight. Blots were washed three times with (TBST) and incubated with HRP-conjugated goat anti-rat secondary antibody (Dako, catalog #X0909) for one hour at room temperature in TBST-milk.

### Lysis and GFP Release in Cells and SCVs

[0194] In order to assess GFP release from vacuoles, ID Salmonella where administered to 4T1 cancer cells. A specialized staining technique was used to identify SCVs and isolate released GFP from un-released, intra-bacterial GFP. The 4T1 cells were grown on glass coverslips were infected with ID Salmonella (Table S1) at an MOI Of 10 using the methods described in the Invasion Assay section.

[0195] At two time points, 6 and 24 hours, four coverslips were fixed and permeabilized as described in the Immunocytochemistry section above. The blocking buffer used for permeabilizing the cells contained Tween 20, which selectively permeabilized mammalian, but not bacterial cell membranes. This allowed primary antibodies to bind GFP in the mammalian cytoplasm, but not inside un-lysed bacteria. After permeabilization, cells were stained for Salmonella, released GFP, and vacuoles (combination 3) in the Immunocytochemistry section) using anti-Salmonella, anti-myc, and anti-LAMP1 antibodies.

[0196] After mounting, coverslips were imaged under oil immersion at 100× magnification. Acquired images were background subtracted and borders were drawn around cells (n=24 at 6 h, and n=7 at 24 h). Released GFP was divided into two groups: vacuolar and cytosolic. Vacuolar GFP was surrounded by LAMP1-stained regions. Cytosolic GFP was all other GFP inside cells. For each cell, the vacuolar and cytosolic GFP fractions were determined as the sum of pixel intensities in the region divided by the sum of intensities in both regions (i.e. the total in the cell). To visualize the localization of released GFP in cells over time, ID Salmonella were administered to 4T1 cancer cells. The cancer cells were grown on glass coverslips were infected with ID Salmonella (Table S1) at an MOI Of 10. At two time points, 6 and 24 hours, four coverslips were fixed and permeabilized as described above. The cells were stained for Salmonella, released GFP, and β-actin (combination 2) with anti-Salmonella and anti-myc antibodies, and phalloidin. Actin staining enables visualization of structures and boundaries. Images were acquired at 100× with oil immersion.

### Dynamic Measurement of GFP Release and Diffusion

[0197] To measure the rate of GFP dispersion through cells after lysis, MCF7 cancer cells were grown on 96-well plates with coverslip glass bottoms for imaging (ThermoFisher, catalog #160376). ID Salmonella were administered at an MOI Of 25 using the methods for live-cell imaging as described in the Invasion Assay section. After washing away extracellular bacteria and adding gentamycin, one cell with intracellular bacteria was identified, and transmitted and fluorescence images were acquired at 63× every minute for 14 hours. This process was repeated ten times. Fluorescence images were selected to start with intact bacteria and end after GFP diffusion. These images were converted into stacks in Zen (Zeiss) and intensities were measured on lines passing through bacterial centers at time zero (before lysis) until diffusion was complete. The GFP spatiotemporal intensity profiles were fit to the radial diffusion equation.

$$\frac{\partial C}{\partial t} = 𝒟 \frac{1}{{r}^{2}} \frac{\partial }{\partial r} ( {r}^{2} \frac{\partial C}{\partial r} ) \qquad ( 1 )$$

In this equation, C is the GFP concentration and D is the effective diffusivity of GFP in the cytosol. When there is an instantaneous release of material at t=0 from r=0 (i.e. lysis), equation (1) has an analytical solution.

$$C ( r , t ) = {( 4 π𝒟 t )}^{\frac{2}{3}} exp ( \frac{- {r}^{2}}{4 𝒟 t} ) \qquad ( 2 )$$

Cytosolic diffusivity of released GFP, D, was determined be fitting the GFP intensity profiles to equation (2) using least-squared fitting.

### Location of GFP Release

[0198] To quantify the location of GFP release in cells, ID Salmonella where administered to 4T1 cancer cells on glass coverslips at an MOI Of 10 using the methods in the Invasion Assay section. At 6 hours, three coverslips were fixed, permeabilized and stained to identify Salmonella, released GFP, and vacuoles (combination 3) in the Immunocytochemistry section) using anti-Salmonella, anti-myc, and anti-LAMP1 antibodies. After mounting, coverslips were imaged under oil immersion at 100× magnification. Acquired images were background subtracted and Salmonella were identified in seven 86.7×66.0 μm regions across the three coverslips. Every bacterium within the regions was classified as un-lysed or lysed if co-localized with released GFP. The location of each lysed Salmonella was determined based on co-localization with LAMP1 staining as inside or outside SCVs. The fraction of released GFP in vacuoles was the number of lysed Salmonella in SCVs over total lysed Salmonella.

### Dependence of Protein Release on Residence in SCVs

[0199] To determine the dependence of protein release on residence in SCVs, ID Salmonella with two gene knockouts were administered to cancer cells. 4T1 cancer cells were grown on coverslips and infected with ΔsifA, ΔsseJ, or ID Salmonella (n=3 for each condition). All three of these strains contained the PsseJ-lysE and Plac-GFP-myc gene circuits (Table S1). The ΔsifA strain predominantly accumulates in the cellular cytoplasm and the ΔsseJ strain predominantly accumulates in SCVs and does not escape into the cytoplasm. Bacteria were administered at an MOI of 10 as described in the Invasion Assay section. At 6 hours after invasion, the cancer cells were fixed, permeabilized and stained for Salmonella and released GFP as described in the Immunocytochemistry section. Nine images from three coverslips were acquired at 20× for each condition. Images were background subtracted. Lysis fraction was calculated using pixel by pixel image analysis in MATLAB. Lysis was identified as pixels that positively stained for GFP-myc. The permeabilization technique prevented staining of GFP inside un-lysed Salmonella. Un-lysed Salmonella were identified as pixels that stained for Salmonella but not GFP-myc. Total bacterial pixels is the sum of these values. Lysis fraction is the number of lysis pixels over total bacterial pixels.

### Dependence of Protein Delivery on Invasion and Intracellular Lysis

[0200] Four strains of Salmonella were administered to cancer cells to determine the necessity of the two engineered gene circuits, PsseJ-LysE and PBAD-flhDC, on protein delivery. Two strains were used: flhDC Sal and flhDC-ID Sal (Table S1). Both of these strains have flhD deleted and only express flhDC after induction with arabinose. The flhDC-ID Sal strain also contains the PsseJ-LysE circuit which induces lysis after cell invasion. Prior to invasion, two cultures of flhDC Sal and flhDC-ID Sal bacteria were grown in LB with 20 mM arabinose to induce flhDC expression. Two cultures were grown without arabinose. For microscopy analysis, 4T1 cancer cells were grown on coverslips and infected at an MOI of 10 with one of the four strains: PsseJ-LysE−, flhDC−; PsseJ-LysE−, flhDC+; PsseJ-LysE+, flhDC−; or PsseJ-LysE+, flhDC+. For flow cytometry, 4T1 cells were grown on six well plates and infected at an MOI of 10 with the same four strains. On both coverslips and well plates, 20 mM arabinose was added to the two induced flhDC+ conditions to maintain expression.

[0201] For microscopy, coverslips were fixed, permeabilized and stained for released GFP as described in the Immunocytochemistry section. Nine images for each condition were acquired at 20× magnification and background subtracted. Protein (GFP) delivery was determined using pixel by pixel image analysis in MATLAB. A pixel was positive for delivery if it stained for GFP-myc. Total delivery was calculated as the sum of the intensities of all delivery positive pixels. Values were normalized by the PsseJ-LysE−, flhDC− condition.

[0202] For flow cytometry, cells were processed into a single cell suspension by gently pipetting after washing with PBS and adding 0.05% trypsin (ThermoFisher, catalog #25300-054). Cells were fixed with 5% formaldehyde in PBS w/ 1 mM EDTA and incubated in blocking buffer for 30 minutes. Cells were intracellularly stained with a 1:2000 dilution of FITC-conjugated anti-Salmonella antibody (Abcam, catalog #ab69253), and a 1:200 dilution of rat anti-myc monoclonal antibody (Chromotek, catalog #9e1-100) for 30 minutes. Cells were washed three times with blocking buffer. Cells were incubated with DyLight 750 anti-rat secondary antibody (ThermoFisher, catalog #SA5-10031) at a 1:200 dilution for one hour at room temperature. Samples were analyzed on a custom-built flow cytometer (dual LSRFortessa 5-laser, BD). All fluorophores were compensated with compensation beads (BD, catalog #552845) and did not carry more than 2% bleed over into any other channel. Control cells that were not infected by Salmonella were used as gating controls to identify uninfected cells in the samples, based on Salmonella staining. Cells administered non-lysing bacteria (i.e., PsseJ-LysE−) were stained with anti-Salmonella antibody, anti-rat secondary antibody, but not the anti-myc primary antibody to identify cells without GFP delivery.

Intracellular Delivery of GFP to Cells in Tumors with ID Salmonella

[0203] To identify and quantify GFP delivery to tumor cells, five BALB/c mice with 4T1 tumors were injected with 2×10⁶ CFU of ID Salmonella (Table S1). Ninety-six hours after bacterial injection, mice were sacrificed and tumors, liver and spleens were excised. Tumors were cut in half. One half was fixed and stained for imaging and the other half was cryopreserved for protein quantification. Livers and spleens were also cryopreserved. Fixed tumors were embedded, sectioned and deparaffinized as described in the Immunohistochemistry section. Tumor sections were stained to identify GFP with a 1:50 dilution of goat anti-GFP (Abcam, ab6556) overnight, followed by incubation with a 1:50 dilution of Alexa Fluor 488-conjugated donkey anti-goat antibody (ThermoFisher, catalog #A21208) at room temperature for 1 h. After counterstaining with DAPI and mounting, sections were imaged at 20×.

[0204] To quantify the amount of delivered protein, half of the tumors as well as the livers and spleens were snap-frozen in liquid nitrogen and stored at −80° C. Lysates were made in a buffer containing 50 mM Tris-HCl at pH 7.4, 0.3% Triton-X 100, 0.1% NP-40 and 0.3 M NaCl. The buffer was supplemented with 25 mM NaF, 5 μM leupeptin, 0.5 mM phenylmethanesulfonyl fluoride, 0.5 mM benzamidine and 1 mM dithiothreitol. As with cancer cells in culture, this buffer lyses mammalian cells but not bacterial membranes, thereby separating delivered protein from protein in intact bacteria. Samples were homogenized on ice using a blender (Polytron) and a homogenizer (Potter-Elvehjem). Samples were incubated for 20 minutes on ice, centrifuged for 10 minutes at 664×g and 4° C. and the supernatant was collected. Immunoblotting was performed following 10% SDS-PAGE with anti-GPF (Abcam, catalog #ab6673) and anti-β-actin (GeneTex, catalog #GTX26276, clone AC-15). Immunoblots were visualized using eCL reagent (PerkinElmer) on a ImageQuant LAS4000 imaging system (GE Healthcare).

Effect of flhDC on Protein Delivery in Mice

[0205] To determine the effect of flhDC on protein delivery, nine BALB/c mice with 4T1 tumors were injected with 2×10⁶ CFU of flhDC-ID Salmonella (Table S1) via the tail vein. Prior to injections, cultures of flhDC-ID Sal were grown in LB with 20 mM arabinose to induce flhDC expression. A second culture was grown without arabinose. At 48 and 72 hours after bacterial injection, 100 μg of arabinose in 400 μl of PBS was injected intraperitoneally into the flhDC+mice to maintain expression. The flhDC− mice received intraperitoneal injections of PBS at the same times. Ninety-six hours after bacterial injection, mice were sacrificed and tumors (n=4 for flhDC− and n=5 for flhDC+) were excised and sectioned as described in the Immunohistochemistry section. Tumor sections were stained to identify GFP with rat anti-GFP monoclonal antibody (Chromotek, catalog #3h9-100) and Alexaflor-568 goat anti-rat secondary antibodies (ThermoFisher, catalog #A11077). After counterstaining with DAPI, sections were imaged at 10× magnification. Images were background subtracted and were analyzed with computational code in MATLAB. Delivery was quantified at 20 random points in the transition zones of each tumor. A point was scored as positive if a cell within 20 μm contained delivered GFP. A cell was considered to have delivered protein if the GFP filled the entire cytoplasm. The delivery fraction is the number of positive points divided by the total number of random points.

### Temporal Colonization of ID Salmonella in Tumors

[0206] To determine tumor density over time, 2×10⁷ CFU ID Salmonella that express luciferase (ID Sal-luc, Table S1) were intravenously injected into five BALB/c mice with orthotopic 4T1 tumors in the mammary fat pad. Bacterial colonization was followed in real time by bioluminescent imaging. At 24, 48, 72, 168, 336 hours after bacterial injection, mice were injected i.p. with 100 μl of 30 mg/ml luciferin in sterile PBS, anesthetized with isoflurane, and imaged with an IVIS animal imager (PerkinElmer, SpectrumCT). Bacterial density in tumors was determined as the proton flux from the tumors. After acquiring the final image (at 14 days), tumors were excised and minced in equal volumes of sterile PBS. Homogenized tumors were cultured on agar plates. Colonies were counted after overnight growth at 37° C.

### Biodistribution and Toxicity of ID Salmonella

[0207] To determine the biodistribution of Salmonella, five tumor-free BALB/c mice were injected with 1×10⁷ ID Salmonella. After 14 days, six organs were excised and weighed: spleen, liver, lung, kidney, heart and brain. Organs were minced in equal volumes of sterile PBS, diluted 10 and 100 times, and cultured on agar plates. Colonies were counted after overnight growth at 37° C. To measure the toxicity of ID Salmonella, four tumor-free BALB/c mice were injected with 1×10⁷ ID Salmonella. Four control mice were injected with sterile saline. After 14 days, whole blood was isolated from anesthetized mice by percutaneous cardiac puncture. Collected blood was divided between clot-activating serum tubes and EDTA anticoagulant tubes for chemistry and CBC analyses, respectively. Chemistry profiling and comprehensive hematology was conducted on the serum and whole blood samples by Idexx Laboratories (Grafton, MA).

Delivery of Nanobodies with ID Salmonella

[0208] To measure the delivery of nanobodies, ID Salmonella were administered to cancer cells and the extent of binding to the protein target was determined by immunoprecipitation. 4T1 cancer cells were grown to 80% confluency in T75 flasks and infected with either NB or ID Salmonella (as controls; Table S1) at an MOI of 10 as described in the Invasion assay section. The β-actin nanobody expressed by NB Salmonella is tagged with the FLAG sequence at the C terminus. Prior to administration, NB Salmonella were grown in LB with 20 mM arabinose to induce nanobody expression and 20 mM arabinose was added to the NB cultures to maintain expression. Twenty-four hours after invasion, the cancer cells were harvested using a cell lifter and centrifuged at 600×g for 10 minutes. The cell pellet was resuspended in 10 ml of lysis buffer (20 mM HEPES, 1 mM EDTA, 10% glycerol w/v, 300 mM sodium chloride and 0.1% Tween) that only lysed cancer cells but not intact bacteria. The cell suspension was homogenized in a douncer using a tight plunger. The cell lysate was clarified by centrifugation at 20,000×g for 20 minutes at 4° C. The lysate was incubated with 50 μl of anti-FLAG purification resin (Biolegend, catalog #651502) overnight at 4° C. The FLAG resin was washed three times with lysis buffer. Fifty microliters of Laemmli buffer was added directly to the bead solution and boiled for 5 minutes at 95° C. Boiled beads were loaded onto SDS-PAGE gels (15% polyacrylamide, cast in-house) in MOPS buffer for Western blotting as described in the Bacterial protein content section. Gels were transferred to nitrocellulose blotting paper. Blots were incubated with mouse anti-actin monoclonal antibody (Cell Signaling Technology, catalog #8H10D10) and HRP-conjugated goat anti-mouse secondary antibodies (ThermoFisher, catalog #31450) to identified β-actin.

### Cytotoxicity of Delivery of CT-Casp-3 and NIPP1-CD to Cells in Culture

[0209] To measure the cytotoxicity of delivering protein drugs, ID Salmonella were administered to cancer cells in culture. Hepa 1-6 liver cancer cells were grown in six well plates to 80% confluency. NIPP1-CD, CT-Casp-3 Salmonella, and control ID Salmonella were administered at MOI of 10 as described in the Invasion assay section. Prior to invasion, cultures of CT-Casp-3 Salmonella were grown in LB with 20 mM arabinose for one hour to induce expression of CT-Casp-3. To all wells, 20 mM arabinose was added to maintain expression. Ethidium homodimer (500 ng/ml) was added to each well to stain dead cells with permeable membranes. Three mages were acquired per well (for nine images per condition) every 30 minutes for 24 hours at 20× magnification. At each time one transmitted and two fluorescent images were acquired: bacterial produced GFP (480/525 excitation/emission) and ethidium homodimer (525/590 excitation/emission). Images were background subtracted. From the fluorescent time-lapse images, cancer cells were identified that were invaded by Salmonella. Cell death was calculated as the fraction of dead Salmonella-invaded cells (co-localized with ethidium homodimer staining) over the total number of Salmonella-invaded cells.

### Delivery of CT-Casp-3 and NIPP1-CD to Tumor Masses

[0210] To measure cell death in tumor masses after delivery of CT-Casp-3 or NIPP1-CD, ID Salmonella were administered to tumor-on-a-chip devices. Microfluidic devices were fabricated as described in the Effect of flhDC on invasion into tumor masses in vitro section. Two independent device experiments were run: (1) NIPP1-CD vs. ID control Salmonella with six chambers each; and (2) CT-Casp-3 vs. ID control Salmonella with four and three chambers, respectively. Prior to administration to the device, CT-Casp-3 Salmonella were grown in LB with 20 mM arabinose to induce expression of CT-Casp-3. NIPP1-CD and ID Salmonella were grown in LB without arabinose. All bacteria were centrifuged and resuspended in culture medium (DMEM with 20 mM HEPES) at a density of 2×10⁷ CFU/ml. For CT-Casp-3 Salmonella, 20 mM arabinose was added to the medium. Bacteria-containing media, containing 500 ng/ml ethidium homodimer, was perfused through the tumor-on-a-chip devices for one hour at 3 μm/min for a total delivery of 2×10⁶ CFU to each device. Bacterial administration was followed by bacteria-free media, with 20 mM HEPES and ethidium homodimer. Transmitted and fluorescence images were acquired every 30 minutes for 24 hours at 5× magnification. Death was calculated by first defined the borders of the tumor masses. Florescence images were segmented to identify regions of dead cells that stained with ethidium homodimer. The extent of death was the fraction of the tumor mass that was dead.

### The Final Fraction of Death was Determined at 24 h.

[0211] Tumor response to delivery of CT-Casp-3 in mice Two mouse models were used to measure the effect of delivering CT-Casp-3: 4T1 murine breast cancer cells in BALB/c mice and Hepa 1-6 murine liver cancer cells in C57L/J mice. For both models, three conditions were tested by injecting saline, ID Salmonella, or CT-Casp-3 Salmonella. The saline controls establish the baseline growth rate of the tumors. The ID Salmonella (bacterial) control established the effect of colonized bacteria and intracellular lysis on the tumor growth rate. For both mouse models, three groups of six mice were subcutaneously injected with 1×10⁵ tumor cells. Once tumors were between 50 and 75 mm³, they were injected with one of the three conditions: saline or 4×10⁷ CFU of ID or CT-Casp-3 Salmonella. At 48 and 72 hours after injection, mice were injected i.p. with 100 mg of arabinose in 400 μl of PBS. Every five days, tumors were injected with bacteria or saline. Tumors were measured twice a week and volumes were calculated with the formula (length)*(width²)/2. Mice were sacrificed when tumors reached 1000 mm³. Tumor growth rates were determined by fitting exponential functions to tumor volumes as functions of time.

### Statistics

[0212] For pair-wise comparisons, Student's t test was used. Statistical significance was confirmed when P<0.05. ANOVA with a Bonferroni correction was used when comparing multiple data points.
[0213] 1. Swofford, C. A., N. Van Dessel, and N. S. Forbes, Quorum-sensing Salmonella selectively trigger protein expression within tumors. Proceedings of the National Academy of Sciences of the United States of America, 2015. 112(11): p. 3457-62.
[0214] 2. Mosberg, J. A., M. J. Lajoie, and G. M. Church, Lambda red recombineering in Eschenchia coli occurs through a fully single-stranded intermediate. Genetics, 2010. 186(3): p. 791-9.
[0215] 3. Vaidya, S., et al., Substrate-induced conformational changes occur in all cleaved forms of caspase-6. J Mol Biol, 2011. 406(1): p. 75-91.
[0216] 4. Yan, Y., et al., Asd-based balanced-lethal system in attenuated Edwardsiella tarda to express a heterologous antigen for a multivalent bacterial vaccine. Fish Shellfish Immunol, 2013. 34(5): p. 1188-94.
[0217] 5. Nakayama, K., S. M. Kelly, and R. Curtiss, Construction of an ASD+ expression-cloning vector—stable maintenance and high-level expression of cloned genes in a Salmonella vaccine strain. Bio-Technology, 1988. 6(6): p. 693-697.
[0218] 6. Toley, B. J. and N. S. Forbes, Motility is critical for effective distribution and accumulation of bacteria in tumor tissue. Integr Biol, 2012. 4(2): p. 165-76.
[0219] 7. Walsh, C. L., et al., A multipurpose microfluidic device designed to mimic microenvironment gradients and develop targeted cancer therapeutics. Lab on a chip, 2009. 9: p. 545-54.

### Results and Discussion

[0220] Herein, the creation of an intracellular protein delivery system based on the natural qualities of Salmonella is described (FIG. 1A). In the intestines, Salmonella have a partially intracellular lifestyle. To evade clearance, Salmonella invade epithelial cells using the proteins expressed by Salmonella pathogenicity island 1 (SPI1) (3,4). After invasion, Salmonella reside in early and late endosomes, which they reform into Salmonella containing vacuoles (SCVs) by expressing the genes of pathogenicity island 2 (SPI2) (5-7). SCVs enable intracellular survival (5,8) and protect the Salmonella from intracellular defense mechanisms (9,10). A step in the activation of SPI2 genes, is the sensing of the endosomal environment. These sensing mechanisms, which are unique to Salmonella, are needed for delivery of proteins into cells.

[0221] While it is well established that Salmonella invade intestinal cells (4,11), their location within tumors is more uncertain, despite extensive documentation of tumor colonization (12-16). Preferential accumulation and exponential growth in tumors are essential properties of therapeutic Salmonella (17,18). When administered in culture, Salmonella readily invade into carcinoma cells (FIG. 1B). To determine where they reside in tumors, Salmonella with a fluorescent intracellular reporter were injected into tumor-bearing BALB/c mice. In these tumors, over 70% of Salmonella were intracellular (P<0.001, n=5, FIG. 1C), demonstrating their suitability as delivery vehicles. In cells dissociated from tumors with collagenase, bacteria were present in carcinoma, immune, and other tumor associated cells (FIG. 1D).

[0222] The development of therapeutic Salmonella into an intracellular protein delivery system had three steps (FIG. 1A). The design goals were to engineer Salmonella to (1) Make a drug, (2) Invade into cells, and (3) Release the drug into cells. The use of bacteria changes what is traditionally meant by “delivery.” Unlike typical delivery vehicles, bacteria manufacture protein drugs at the disease site (19), delivering exponentially more molecules than were originally present in the injected bacteria. Chronologically, the first steps were to generate a platform strain with controlled invasion and release. The last step was to transform this platform strain with genes to synthesize different protein drugs. In the final engineered strains of Intracellular Delivering (ID) Salmonella, each of these three processes (make, invade and release) was controlled by a specialized genetic circuit.

[0223] In this system, invasion of ID Salmonella into cells is controlled with the regulation factor flhDC(FIG. 1E-G). Expression of flhDC is required for Salmonella to invade cancer cells (FIG. 1E). When flhDC is not expressed, Salmonella invaded less than 2% of cells, which was 54 times less than by Salmonella with re-expressed flhDC (84%; P<0.001; FIG. 1E). Invasion is dependent on flhDC because it regulates the production of flagella and the type III secretion system (20). In microfluidic tumor masses in vitro (21), re-expression of flhDC increased cell invasion and colonization 53 times (P<0.01, FIG. 1F). In tumors, re-expression of flhDC increased invasion into both carcinoma and immune cells (P<0.05, FIG. 1G).

[0224] The second component of ID Salmonella, release, required development of a system to trigger autonomous lysis after cell invasion (FIG. 2). This goal was achieved by identifying a Salmonella promoter that is triggered intracellularly and not extracellularly. After invasion into cells, the genes of SPI2 activate to form Salmonella containing vacuoles (SCVs) (8). When coupled to a GFP reporter, the promoters of two SPI2-associated genes, PsseJ and PsifA, both activate after invasion into cancer cells (FIG. 2A, left). However, the extracellular expression of PsseJ is 5.8 times less than PsifA (P<0.001, FIG. 2A), indicating that it is more sensitive to cell invasion.

[0225] To release a synthesized protein cargo, the bacteria must lyse after invasion. Triggered expression of Lysin gene E (LysE) from bacteriophage DX1174 causes rapid bacterial death (FIG. 2B). Salmonella, with the coupled PsseJ-LysE construct and that constitutively expresses GFP (as a model protein drug), lysed after invasion into cancer cells (FIG. 2C), and discharged GFP into the cytoplasm (FIG. 2D). Bacterial lysis occurs for 10 hours after invasion (FIG. 2E). The basal expression of Lysin E by the PsseJ-LysE circuit does not affect bacterial health and intracellular induction activated the system at near to its maximum rate (FIG. 2F). Each bacterium can deliver, on average, 163,000 GFP molecules (FIG. 2G).

[0226] After bacterial lysis, delivered protein escapes SCVs and fills the cellular cytoplasm (FIG. 2H-I). This escape is important because, immediately after invasion, most Salmonella reside within SCVs (FIG. 2H, left). When ID Salmonella lyse, clusters of released GFP protein are contained within SCVs (FIG. 2H, middle). Over time, the protein escapes the SCVs and fills the entire cytoplasm (FIG. 2I), a transition that occurs for most cells (P<0.001, FIG. 2H, right). GFP diffuses through the cytoplasm with an effective diffusivity of 0.15 μm2/min (FIG. 2J).

[0227] As designed, bacterial lysis is dependent on residence within SCVs (FIG. 3A-B). After invasion, some ID Salmonella escape into the cytoplasm and are not surrounded by a SCV membrane (FIG. 3A, left). More than 95% of GFP released from Salmonella originated inside SCVs (P<0.001; FIG. 3A, right). After invasion into cancer cells, ID Salmonella with a ΔsifA deletion, which are predominantly cytoplasmic (23), did not lyse despite containing the PsseJ-LysE construct. Comparatively, ID Salmonella with a ΔsseJ, which are predominantly vacuolar (24), almost all lysed (P<0.001, FIG. 3B). Without these deletions, most ID Salmonella localized to SCVs, lysed and delivered protein (P<0.001, FIG. 3B). This dependence indicates that the Pssej promoter only activates after SCV localization and not when in the cytoplasm. This specific sensing of the SCV environment is a feature exclusive to Salmonella.

[0228] Protein delivery was dependent on the two engineered systems, PBAD-flhDC for invasion and PsseJ-LysE for release (FIG. 3C). Salmonella without flhDC expression did not invade cells, and Salmonella without Pssei-LysE did not release the GFP cargo (FIGS. 3C&S2). Compared to controls, the presence of both systems increased protein delivery 548 times (P<0.001; FIG. 3C).

[0229] When administered systemically to tumor-bearing mice, ID Salmonella specifically deliver protein to tumor cells, and this delivery is dependent on flhDC (FIG. 3D-F). ID Salmonella invaded cells and delivered GFP that filled the cellular cytoplasm (FIG. 3D). This system delivered 60 t 12 μg GFP/g tumor (FIG. 3E), which is equivalent to 1.5×10⁸ bacteria per gram of tumor. No GFP was detected in the livers or spleens of any mice (FIG. 3E). When tumor-bearing mice were administered ID Salmonella that did not express flhDC, little GFP was delivered (FIG. 3F). Re-expressing flhDC increased the percentage of cells that received GFP more than five times (P<0.001).

[0230] Delivery of proteins with ID Salmonella is safe and self-limiting (FIG. 3G). After intravenous administration, the tumor density of ID Salmonella reached a peak at 72 h and then dropped 97% in 11 days (FIG. 3E). The decline in density, which was caused by intracellular lysis, limits the exposure to therapy and increases safety compared to non-lysing Salmonella. After administration to healthy, tumor-free mice, ID Salmonella did not accumulate in lungs, hearts, kidneys or brains; had no effect on liver function; and caused no adverse immune responses.

[0231] To demonstrate its broad capabilities, ID Salmonella was engineered to make three different proteins (FIG. 4) that affect intracellular physiology: a nanobody (anti-actin), a protein inhibitor (NIPP1-CD), and an endogenous protein (CT casp-3). The central domain of nuclear inhibitor of protein phosphatase 1 (NIPP1-CD) removes PP1 from its holoenzymes and induces cell death (25). Constitutive two-chain active caspase-3 (CT Casp-3) is an engineered active form of caspase-3, the dominant executioner caspase that leads to apoptotic cell death (26, 27).

[0232] In one aspect, a bicistronic mRNA codes for caspase, with, for example, the large subunit followed by a ribosomal binding site and the small subunit on, for example, PBAD inducible promoter.

active caspase 3 sequence (bicistronic mRNA-FLAG-large subunit,
RBS, small subunit-myc)
(SEQ ID NO: 200)
ATGGACTACAAAGACGATGACGACAAGATGGAGAACACTGAAAACTCAGTGGATTCAAAATCCATTAA
AAATTTGGAACCAAAGATCATACATGGAAGCGAATCAATGGACTCTGGAATATCCCTGGACAACAGIT
ATAAAATGGATTATCCTGAGATGGGTTTATGTATAATAATTAATAATAAGAATTTTCATAAAAGCACT
GGAATGACATCTCGGTCTGGTACAGATGTCGATGCAGCAAACCTCAGGGAAACATTCAGAAACTTGAA
ATATGAAGTCAGGAATAAAAATGATCTTACACGTGAAGAAATTGTGGAATTGATGCGTGATGTTTCTA
AAGAAGATCACAGCAAAAGGAGCAGTTTTGTTTGTGTGCTTCTGAGCCATGGTGAAGAAGGAATAATT
TTTGGAACAAATGGACCTGTTGACCTGAAAAAAATAACAAACTTTTTCAGAGGGGATCGTTGTAGAAG
TCTAACTGGAAAACCCAAACTTTTCATTATTCAGGCCTGCCGTGGTACAGAACTGGACTGTGGCATTG
AGACAGACTAAGTATAAGAAGGAGATATACATATGAGTGGTGTTGATGATGACATGGCGTGTCATAAA
ATACCAGTGGAGGCCGACTTCTTGTATGCATACTCCACAGCACCTGGTTATTATTCTTGGCGAAATTC
AAAGGATGGCTCCTGGTTCATCCAGTCGCTTTGTGCCATGCTGAAACAGTATGCCGACAAGCTTGAAT
TTATGCACATTCTTACCCGGGTTAACCGAAAGGTGGCAACAGAATTTGAGTCCTTTTCCTTTGACGCT
ACTTTTCATGCAAAGAAACAGATTCCATGTATTGTTTCCATGCTCACAAAAGAACTCTATTTTTATCA
CGAACAAAAACTCATCTCAGAAGAGGATCTGTAA
Large subunit sequence (DNA sequence)
(SEQ ID NO: 201)
ATGGACTACAAAGACGATGACGACAAGATGGAGAACACTGAAAACTCAGTGGATTCAAAATCCATTAA
AAATTTGGAACCAAAGATCATACATGGAAGCGAATCAATGGACTCTGGAATATCCCTGGACAACAGTT
ATAAAATGGATTATCCTGAGATGGGTTTATGTATAATAATTAATAATAAGAATTTTCATAAAAGCACT
GGAATGACATCTCGGTCTGGTACAGATGTCGATGCAGCAAACCTCAGGGAAACATTCAGAAACTTGAA
ATATGAAGTCAGGAATAAAAATGATCTTACACGTGAAGAAATTGTGGAATTGATGCGTGATGTTTCTA
AAGAAGATCACAGCAAAAGGAGCAGTTTTGTTTGTGTGCTTCTGAGCCATGGTGAAGAAGGAATAATT
TTTGGAACAAATGGACCTGTTGACCTGAAAAAAATAACAAACTTTTTCAGAGGGGATCGTTGTAGAAG
TCTAACTGGAAAACCCAAACTTTTCATTATTCAGGCCTGCCGTGGTACAGAACTGGACTGTGGCATTG
AGACAGACTAA
Large subunit (protein sequence)
SEQ ID NO: 202)
MDYKDDDDKMENTENSVDSKSIKNLEPKIIHGSESMDSGISLDNSYKMDYPEMGLCIIIN
NKNFHKSTGMTSRSGTDVDAANLRETFRNLKYEVRNKNDLTREEIVELMRDVSKEDHS
KRSSFVCVLLSHGEEGIIFGTNGPVDLKKITNFFRGDRCRSLTGKPKLFIIQACRGTELDC
GIETD
Small subunit (DNA sequence)
SEQ ID NO: 203)
ATGAGTGGTGTTGATGATGACATGGCGTGTCATAAAATACCAGTGGAGGCCGACTTCTTGTATGCATA
CTCCACAGCACCTGGTTATTATTCTTGGCGAAATTCAAAGGATGGCTCCTGGTTCATCCAGTCGCTTT
GTGCCATGCTGAAACAGTATGCCGACAAGCTTGAATTTATGCACATTCTTACCCGGGTTAACCGAAAG
GTGGCAACAGAATTTGAGTCCTTTTCCTTTGACGCTACTTTTCATGCAAAGAAACAGATTCCATGTAT
TGTTTCCATGCTCACAAAAGAACTCTATTTTTATCACGAACAAAAACTCATCTCAGAAGAGGATCTGT
AA
Small subunit (protein sequence)
SEQ ID NO: 204)
MSGVDDDMACHKIPVEADFLYAYSTAPGYYSWRNSKDGSWFIQSLCAMLKQYADKLE
FMHILTRVNRKVATEFESFSFDATFHAKKQIPCIVSMLTKELYFYHEQKLISEEDL

[0233] After bacterial delivery via invasion and lysis, the anti-actin nanobody was bound to cellular actin (FIG. 4A), demonstrating specific targeting of an intracellular protein. As potential therapeutic proteins, delivery of both NIPP1-CD and CT Casp-3 caused more cell death than controls (P<0.001; FIG. 4B, left). Induced death was dependent on invasion and protein delivery (FIG. 4B, right). When administered to microfluidic tumors devices, ID Salmonella delivering NIPP1-CD (P<0.05) and CT Casp-3 (P<0.01) caused cell death that increased with time as bacteria invaded the tumor masses (FIG. 4C).

[0234] Delivery of CT Casp-3 was effective against both liver cancer and triple-negative breast cancer in mice (FIG. 4D-E). After 14 days of treatment, delivery to BALB/c mice reduced the volume of 4T1 mammary tumors two times more than controls (P<0.05, FIG. 4D). Administration of ID Salmonella with CT Casp-3 significantly reduced the volume of liver Hepa 1-6 tumors in C57L/J mice (P<0.001; FIG. 4E, left) and reduced tumor growth rate 28 times (P<0.05; FIG. 4E, middle), which is equivalent to an increase in doubling time from 5 to 148 days. Tumor volume reduced in two mice for over 50 days, and survival increased significantly compared to bacterial controls (P<0.05, FIG. 4E right). Treatment with CT Casp-3 completely eliminated the tumor from one mouse, which was disease free for over 124 days.

### Conclusion

[0235] Described herein is an autonomous, intracellular Salmonella vehicle that efficiently delivers properly folded and active proteins into cells. This bacterial strain is safe, eliminates tumors and increases survival. The engineered gene circuits produce protein drugs, cause hyper-invasion (flhDC) and trigger bacterial lysis after cell invasion. Because the system is autonomous, it does not require intervention and is self-timing. Protein delivery is triggered at the most opportune time for individual bacteria, ensuring that proteins are deposited inside cells and not in the extracellular environment. The accumulation of ID Salmonella in different cell types in tumors (FIGS. 1D&G), suggests that this system could be used to deliver proteins to non-cancerous tumor-associated cells, e.g., macrophages or endothelial cells.

[0236] Coupled together, two essential qualities of ID Salmonella enable the use of protein drugs that are currently not feasible. Intracellular Salmonella delivery (1) transports intact, functional proteins across the cell membrane; and preferential tumor accumulation (2) maintains safety for protein drugs that would act broadly against healthy cells. Both NIPP1-CD and CT Casp-3 have exclusively intracellular targets and would be toxic if delivered systemically. The specific accumulation of ID Salmonella eliminates these problems by focusing therapy specifically on the intracellular environment of tumors (FIGS. 1C and 3E).

[0237] The use of ID Salmonella to deliver CT Casp-3 can address the need for an effective treatment for unresectable hepatocellular carcinoma (HCC). No curative treatment currently exists for the 840,000 patients who are diagnosed with HCC annually (28, 29). Current therapies have toxic side effects and only modestly increase survival (29-31). Treatment with CT Casp-3 ID Salmonella can be curative (FIG. 4E) and is safer. Inclusion of the PsseJ-LysE circuit makes ID Salmonella self-limiting. The delivery bacteria lyse after cell invasion (FIG. 3F), reducing the possibility of unwanted infections.

[0238] Delivery with ID Salmonella enables targeting of inaccessible cancer pathways and will accelerate the generation of new cancer therapies. These therapies can be created by coding the genes for specific protein drugs into Salmonella expression cassettes. Nanobodies (FIG. 4A) can be designed that specifically inhibit pathways necessary for cancer survival and progression. Using bacteria to deliver proteins into cells will expand the number of accessible pathways, open up many targets across the soluble proteome for treatment, and increase the efficacy and safety of cancer treatment.

### BIBLIOGRAPHY

[0239] 1 Uhlen, M. et al. Proteomics. Tissue-based map of the human proteome. Science 347, 1260419, doi:10.1126/science.1260419 (2015).
[0240] 2 Hanahan, D. & Weinberg, R. A. Hallmarks of Cancer: The Next Generation. Cell 144, 646-674, doi:10.1016/j.cell.2011.02.013 (2011).
[0241] 3 Ibarra, J. A. et al. Induction of Salmonella pathogenicity island 1 under different growth conditions can affect Salmonella-host cell interactions in vitro. Microbiology 156, 1120-1133, doi:10.1099/mic.0.032896-0 (2010).
[0242] 4 Knodler, L. A. et al. Dissemination of invasive Salmonella via bacterial-induced extrusion of mucosal epithelia. Proc Natl Acad Sci USA 107, 17733-17738, doi:10.1073/pnas.1006098107 (2010).
[0243] 5 Liss, V. et al. Salmonella enterica Remodels the Host Cell Endosomal System for Efficient Intravacuolar Nutrition. Cell Host Microbe 21, 390-402, doi:10.1016/j.chom.2017.02.005 (2017).
[0244] 6 Krieger, V. et al. Reorganization of the endosomal system in Salmonella-infected cells: the ultrastructure of Salmonella-induced tubular compartments. PLoS Pathog 10, e1004374, doi:10.1371/journal.ppat.1004374 (2014).
[0245] 7 Rajashekar, R., Liebl, D., Seitz, A. & Hensel, M. Dynamic remodeling of the endosomal system during formation of Salmonella-induced filaments by intracellular Salmonella enterica. Traffic 9, 2100-2116, doi:10.1111/j.1600-0854.2008.00821.x (2008).
[0246] 8 Galan, J. E. Salmonella interactions with host cells: type III secretion at work. Annu Rev Cell Dev Biol 17, 53-86, doi:10.1146/annurev.cellbio.17.1.53 (2001).
[0247] 9 Eisele, N. A. et al. Salmonella require the fatty acid regulator PPARdelta for the establishment of a metabolic environment essential for long-term persistence. Cell Host Microbe 14, 171-182, doi:10.1016/j.chom.2013.07.010 (2013).
[0248] 10 Knuff, K. & Finlay, B. B. What the SIF Is Happening—The Role of Intracellular Salmonella-Induced Filaments. Front Cell Infect Microbiol 7, 335, doi:10.3389/fcimb.2017.00335 (2017).
[0249] 11 Zhang, K. et al. Minimal SPI1-T3SS effector requirement for Salmonella enterocyte invasion and intracellular proliferation in vivo. PLoS Pathog 14, e1006925, doi:10.1371/journal.ppat.1006925 (2018).
[0250] 12 Forbes, N. S., Munn, L. L., Fukumura, D. & Jain, R. K. Sparse initial entrapment of systemically injected Salmonella typhimurium leads to heterogeneous accumulation within tumors. Cancer Res 63, 5188-5193 (2003).
[0251] 13 Low, K. B. et al. Lipid A mutant Salmonella with suppressed virulence and TNFalpha induction retain tumor-targeting in vivo. Nature biotechnology 17, 37-41, doi:10.1038/5205 (1999).
[0252] 14 Zheng, J. H. et al. Two-step enhanced cancer immunotherapy with engineered Salmonella typhimurium secreting heterologous flagellin. Sci. Transl. Med. 9, 10, doi:10.1126/scitranslmed.aak9537 (2017).
[0253] 15 Zhao, M. et al. Tumor-targeting bacterial therapy with amino acid auxotrophs of GFP-expressing Salmonella typhimurium. Proceedings of the National Academy of Sciences of the United States of America 102, 755-760, doi:10.1073/pnas.0408422102 (2005).
[0254] 16 Morrissey, D., O'Sullivan, G. C. & Tangney, M. Tumour Targeting with Systemically Administered Bacteria. Current Gene Therapy 10, 3-14, doi:10.2174/156652310790945575 (2010).
[0255] 17 Ganai, S., Arenas, R. B., Sauer, J. P., Bentley, B. & Forbes, N. S. In tumors Salmonella migrate away from vasculature toward the transition zone and induce apoptosis. Cancer Gene Ther 18, 457-466, doi:10.1038/cgt.2011.10 (2011).
[0256] 18 Forbes, N. S. Engineering the perfect (bacterial) cancer therapy. Nature Reviews Cancer 10, 785-794, doi:10.1038/nrc2934 (2010).
[0257] 19 Kong, W., Clark-Curtiss, J. & Curtiss, R., 3rd. Utilizing Salmonella for antigen delivery: the aims and benefits of bacterial delivered vaccination. Expert Rev Vaccines 12, 345-347, doi:10.1586/erv.13.7 (2013).
[0258] 20 Raman, V., Van Dessel, N., O'Connor, O. M. & Forbes, N. S. The motility regulator flhDC drives intracellular accumulation and tumor colonization of Salmonella. J Immunother Cancer 7, 44, doi:10.1186/s40425-018-0490-z (2019).
[0259] 21 Walsh, C. L. et al. A multipurpose microfluidic device designed to mimic microenvironment gradients and develop targeted cancer therapeutics. Lab on a chip 9, 545-554, doi:10.1039/b810571e (2009).
[0260] 22 Finn, C. E., Chong, A., Cooper, K. G., Starr, T. & Steele-Mortimer, O. A second wave of Salmonella T3SS1 activity prolongs the lifespan of infected epithelial cells. PLoS Pathog 13, e1006354, doi:10.1371/journal.ppat.1006354 (2017).
[0261] 23 Beuzon, C. R. et al. Salmonella maintains the integrity of its intracellular vacuole through the action of SifA. EMBO J 19, 3235-3249, doi:10.1093/emboj/19.13.3235 (2000).
[0262] 24 Ruiz-Albert, J. et al. Complementary activities of SseJ and SifA regulate dynamics of the Salmonella typhimurium vacuolar membrane. Mol. Microbiol. 44, 645-661, doi:10.1046/j.1365-2958.2002.02912.x (2002).
[0263] 25 Chatterjee, J. et al. Development of a peptide that selectively activates protein phosphatase-1 in living cells. Angewandte Chemie (International ed 51, 10054-10059, doi:10.1002/anie.201204308 (2012).
[0264] 26 Slee, E. A., Adrain, C. & Martin, S. J. Executioner caspase-3, -6, and -7 perform distinct, non-redundant roles during the demolition phase of apoptosis. J Biol Chem 276, 7320-7326, doi:10.1074/jbc.M008363200 (2001).
[0265] 27 Walsh, J. G. et al. Executioner caspase-3 and caspase-7 are functionally distinct proteases. Proc Natl Acad Sci USA 105, 12815-12819, doi:10.1073/pnas.0707715105 (2008).
[0266] 28 Siegel, R. et al. Cancer treatment and survivorship statistics, 2012. CA Cancer J Clin 62, 220-241, doi:10.3322/caac.21149 (2012).
[0267] 29 Raza, A. & Sood, G. K. Hepatocellular carcinoma review: current treatment, and evidence-based medicine. World J Gastroenterol 20, 4115-4127, doi:10.3748/wjg.v20.i15.4115 (2014).
[0268] Keating, G. M. & Santoro, A. Sorafenib: a review of its use in advanced hepatocellular carcinoma. Drugs 69, 223-240, doi:10.2165/00003495-200969020-00006 (2009).
[0269] 31 Vogl, T. J. et al. [Transarterial chemoembolization (TACE) in hepatocellular carcinoma: technique, indication and results]. Rofo 179, 1113-1126, doi:10.1055/s-2007-963285 (2007).

### Example II

### Introduction

[0270] Intracellularly targeted, macromolecular therapies present an opportunity for treatment of cancer. The mammalian proteome consists of 60% intracellular protein while only 30% are surface associated and extracellularly exposed (1). However, macromolecules face tumor specificity, distribution, cell internalization and endosomal release barriers (2). An improved drug delivery system is needed to circumvent these delivery limitations and increase therapeutic efficacy of intracellularly active therapies. Salmonella are ideally suited for tumor selective intracellular protein delivery. Salmonella colonize tumors with high specificity, invade, and deliver protein therapies selectively inside tumor cells. Herein the discovery that flhDC expression is crucial for protein delivery into tumor cells with Salmonella has been reported. To this end, it was sought to determine the mechanisms by which flhDC expression enables intracellular therapeutic delivery in vivo. The unique mechanisms by which engineered Salmonella expressing flhDC developed resistance to intracellular therapeutic delivery was also assessed. Understanding these mechanisms help create improved tumor targeted, intracellular delivery strains of Salmonella.

[0271] Typhoidal strains of Salmonella that systemically infect humans carefully modulate flagellar expression in vivo. The typhoidal bacteria that disseminate systemically infect humans implement genetic programs to downregulate expression of the flagellar synthesis regulator (3-5), flhDC, in the blood (6, 7). One reason for this is because flagellin is a TLR5/NLRC4 agonist that strongly activates an anti-microbial immune response (8, 9). However, in tumor tissue, intracellular invasion and delivery into cancer cells requires activation of the Salmonella transcription factor, flhDC (10). Therefore, developing a method to control flhDC activity in engineered Salmonella is necessary to enable high levels of therapeutic delivery in tumors.

[0272] Modulation of flhDC activity within Salmonella has significant implications in determining tumor selectivity and reducing systemic virulence. Unlike tumors, clearance organs like the liver and spleen, have high concentrations of functional immune cells that mount strong responses upon pathogenic insult. The liver is a vital clearance organ and an essential site specific for immune mediated Salmonella clearance (11). The motility regulator, flhDC, regulates flagellar expression but is also a broad regulator of Salmonella lifestyle and virulence (10, 12, 13). Flagellar expression within Salmonella in macrophages or epithelial cells causes excessive, NLRC4 inflammasome dependent, pyroptosis. Salmonella hijack this inflammatory pathway to overexaggerate the anti-microbial response both in macrophages and within the gut, causing immune dysfunction (14, 15). Since the liver contains large quantities of Kupfer cells, flagellated Salmonella can cause significant pyroptosis in these liver specific macrophages. While pyroptosis is required in limited quantities to eliminate pathogens, flagellated Salmonella cause high levels of pyroptosis that render the anti-microbial immune response dysfunctional (14, 16). Macrophages are more effective at clearing Salmonella expressing lower levels of flhDC due to reduced flagellar expression, limited pyroptosis resulting in less immune dysfunction (16). Since tumors do not share the same level of immune function, low flagellin expression does not affect tumor colonization (17).

[0273] Upon invasion into a cell, there are two existing mechanisms by which therapy is delivered into the cytosol by Salmonella: (1) The bacteria invade, escape the intracellular vacuole, rupture, and deliver therapy into the cytosol (18-20) or (2) the bacteria are genetically engineered to lyse and deliver therapy from within the Salmonella containing vacuole into the cytosol. Several variants of cytosolic bacteria (ΔsifA Salmonella, Listeriolysin O expressing bacteria) have been used for therapeutic delivery into tumor cells (18-20). In scenario (1), therapeutic delivery would require the bacteria to reside in the cytoplasm of a cancer cell and lyse spontaneously without any control. This mechanism would depend on ubiquitin dependent degradation (21) of the bacteria and subsequent cytosolic release of the therapy. In addition, cytoplasmic pathogens are known to strongly activate NF-kB signaling and initiate innate immune responses to clear the bacteria (9, 21, 22). Therefore, a high presence of cytosolic Salmonella is detrimental for immune evasion.

[0274] Salmonella have evolved to reside within an intracellular vacuole which confers protection to the bacteria inside cells (23, 24). The bacteria modify the vacuole to confer protection against degradation and clearance (25, 26). In addition, vacuolar residence seems to be especially important for bacteria in systemic circulation as demonstrated by Salmonella Typhi. The spi-2 protein, SseJ, is required for Salmonella to escape the SCV (27). Salmonella Typhimurium, which express SseJ, are localized to the gastrointestinal tract in humans (28). Salmonella Typhi, which lacks SseJ (29), is efficient at escaping the gastrointestinal tract into systemic circulation (30). Moreover, Salmonella Typhi only expresses typhoid toxin intracellularly within the SCV (31, 32). These critical between Salmonella Typhi and Salmonella Typhimurium suggest that vacuolar residence is imperative to increase bacterial fitness in vivo.

[0275] Understanding the dynamics between vacuolar and cytosolic Salmonella expressing flhDC will aid in engineering an intracellular delivery strain of Salmonella. Herein we have shown that intracellular lysis of engineered Salmonella occurs in a vacuole. However, flagellated, intracellular Salmonella have a significant cytosolic presence (12). Intracellular Invasion is driven by flhDC and T3SS1 activity (10, 12, 33-35). Upon invading cells, Salmonella heavily modify the vacuoles in which they reside (24, 36). In doing so, some bacteria rupture the vacuole and escape (37, 38). Normally, the intravacuolar bacteria also downregulate flagellar expression through ssrB directed suppression of flhDC (39) (the ssrB protein is considered a master regulator of SPI-2 expression (33)). However, flagellated, cytosolic Salmonella have abrogated T3SS2 activity due to vacuolar escape (12). As shown herein, T3SS2 activity is needed to enable intracellular lysis and delivery of protein with therapeutic Salmonella.

[0276] Provided herein is a showing of how controlled expression of flhDC could improve tumor colonization and therapeutic delivery in vivo as compared to existing delivery strategies. Further the mechanism is eluicidated of flhDC induced resistance to therapeutic delivery and a genetic engineering strategy to rescue therapeutic delivery of the Salmonella strain. It was hypothesized that flhDC expression selectively within intratumoral bacteria is important for increasing tumor specificity, colonization and protein delivery to a spatially distributed set of tumor cells. It was further hypothesized that engineered Salmonella inducibly expressing flhDC could deliver more protein intracellularly compared to exclusively cytosolic Salmonella. It was also hypothesized that flhDC activity enabled lysis resistance in engineered Salmonella but could be rescued. To test these hypotheses, cell-based assays, tumor-on-a-chip models, and in vivo experiments were employed to quantitatively understand the mechanisms underlying intracellular therapeutic delivery with engineered Salmonella. Discovering the key mechanisms governing therapeutic delivery with Salmonella would address limitations with current delivery methods and provide a foundation to robustly improve delivery efficiency of the engineered bacteria for a wide variety of cancers.

### Materials and Methods

### Bacterial Cultures

[0277] All bacterial cultures (both Salmonella and DH5α) were grown in LB (10 g/L sodium chloride, 10 g/L tryptone and 5 g/L yeast extract). Resistant strains of bacteria were grown in the presence of carbenicllin (100 μg/ml), chloramphenicol (33 μg/ml), kanamycin (50 μg/ml) and/or 100 μg/ml of DAP.

### Cloning

[0278] One of three plasmids were used in all experiments. The first plasmid, P1, was created by cloning the flhDC gene into the PBAD his-myc plasmid (Invitrogen; catalog #V430-01). Primers vr46 and vr47 were used to PCR the flhDC gene from VNP20009 genomic DNA. The PCR product was digested with NcoI and XhoI and DpnI (NEB, catalog #s R0193S, R0146S and R0176L). The PBAD-his-myc backbone was digested with NcoI, XhoI and calf intestinal phosphatase (NEB, catalog #M0290). A PCR cleanup column (Zymo Research) was used to clean up both products. 50 ng of digested vector backbone and 500 ng of digested PCR product were ligated together using T4 DNA ligase (NEB). The ligated product was transformed into DH5a E. Coli. Positive transformants were confirmed by sequencing (Plasmid P1a). To add the plac-GFP-myc genetic circuit to the plasmid, plasmid P1a was PCR amplified using primers vr385 and vr386. The plac-GFP-myc genetic circuit was PCR amplified from a previously generated plasmid (40) using primers vr394 and vr395. Both PCR products were DpnI digested. 50 ng of P1a PCR product and 500 ng of were ligated together using a 2×Hifi DNA assembly master mix (NEB). The resulting product was transformed into DH5a E. Coli and the complete P1b plasmid was purified from positive colonies. To create complete plasmid P1, PCR was used to amplify the P1b backbone using primers vr426 and vr427. The ASD gene was amplified from a previously generated plasmid, PCS2 (40) using primers vr424 and vr425. 50 ng of the P1b PCR product and 500 ng of the ASD PCR product were ligated together using 2×Hifi DNA assembly master mix. The resulting ligation was transformed into chemically competent DH5a E. Coli. Complete, P1 plasmid was purified from colonies screening positive for GFP, ASD and PBAD-flhDC.

[0279] To create plasmid P2, plasmid P1 was PCR amplified using primers vr396 and vr397. The psseJ-lysinE genetic circuit was amplified from synthesized DNA (Genscript) using primers vr398 and vr399. The two PCR products were DpnI digested and purified using PCR clean up columns (Zymo Research). 50 ng of backbone PCR and 500 ng of psseJ-lysinE PCR product was used in a ligation reaction with 2×Hifi assembly master mix (NEB) to create plasmid, P2a. Plasmid was purified from colonies that screened positive for plasmid assembly for downstream applications. To create complete P2, plasmid P2a was PCR amplified using primers vr426 and vr427. The ASD gene was amplified as previously described using primers vr424 and vr425. Both PCR products were DpnI digested and purified using a PCR clean up column as previously described. 50 ng of the P2a PCR product was ligated together with 500 ng of the ASD PCR product using 2×Hifi DNA assembly master mix. The resulting ligation was transformed into DH5a E. Coli and complete P2 plasmid was purified from colonies screening positive for GFP, ASD, PBAD-flhDC and sseJ-lysinE.

[0280] To create plasmid P3 (sseJ-GFP-myc+PBAD-flhDC), plasmid P1a was PCR amplified using primers vr271 and vr272. The sseJ-GFP-myc genetic circuit was PCR amplified from a previously generated plasmid (10) using primers vr269 and vr270. The resulting PCR products were DpnI digested and purified using PCR clean up columns. 50 ng of the P1a backbone and 500 ng of the psseJ-GFP-myc PCR products were ligated together using 2×Hifi DNA assembly master mix. The resulting ligations were transformed into DH5a E. Coli. Complete, P3 plasmid was purified from colonies that screened positive for psseJ-GFP-myc and PBAD-flhDC for downstream application.

TABLE 1
Primers for deletion mutants

| Name | Primer sequence | Gene | Template |
|---|---|---|---|
| vr121 | FOFZCACGGGGTGCGGCTACGTCGCACAAA | flhD forward | pkd4 |
| | AATAAAGTTGGTTATTCTGGGTCTTGAGCG | | |
| | ATTGTGTAGGC SEQ ID NO: 205) | | |
| vr309 | EOEFATCCTGAGTCAAACGGGTGATCGTCT | flhD reverse | pkd4 |
| | GATGATCGTCAAACCGGAAAAATTAGCCAT | | |
| | GGTCCATATGAATATC SEQ ID NO: 206) | | |
| vr266 | FZEFAAAATGTTGGTTTTATCGGCTGGCGCG | asd forward | pkd3 |
| | GAATGGTCGGCTCTGTTCTGTCTTGAGCGAT | | |
| | TGTGTAGGC SEQ ID NO: 207) | | |
| vr268 | OZFOGCCAACTGGCGCAGCATTCGACGCAG | asd reverse | pkd3 |
| | CGGCTCGGCGGCGCCCCATAAATTAGCCAT | | |
| | GGTCCATATGAATATC SEQ ID NO: 208) | | |
| vr318 | FZEFGTAATCTTAGCGGTACCGATAAAAGC | fliGHI | pkd3/pkd4 |
| | GTCATTTTGTTGATGACCATGTCTTGAGCGA | forward | |
| | TTGTGTAGGC SEQ ID NO: 209) | | |
| vr319 | FFFFTTAAATCGAGCGCCTGCAGAGAGTCCT | fliGHI | pkd3/pkd4 |
| | CCCAGTCGGCCCGTTCAAAAATTAGCCATG | reverse | |
| | GTCCATATGAATAT SEQ ID NO: 210) | | |
| vr432 | FZEOCATTGAGTGTTGGACAGGGTTATTTCA | sseJ forward | pkd4 |
| | CATCATCTATCAGTTCTGAGTCTTGAGCGAT | | |
| | TGTGTAGGC SEQ ID NO: 211) | | |
| vr433 | ZZFZTCAGTGGAATAATGATGAGCTATAAA | sseJ reverse | pkd4 |
| | ACTTTCTAACATTATGGCAAAATTAGCCAT | | |
| | GGTCCATATGAATATC SEQ ID NO: 212) | | |
| vr434 | FZEOCGATTACTATAGGGAATGGTTTTTTAA | sifA forward | pkd4 |
| | AAAGTGAAATCCTTACCAAGTCTTGAGCGA | | |
| | TTGTGTAGGC SEQ ID NO: 213) | | |
| vr435 | ZZFZAAAAAACAACATAAACAGCCGCTTTG | sifA reverse | pkd4 |
| | TTGTTCTGAGCGAACGTGTAAATTAGCCAT | | |
| | GGTCCATATGAATATC SEQ ID NO: 214) | | |

TABLE 2
Primers for plasmid construction

| Name | Sequence | Description |
|---|---|---|
| vr46 | AAAAAACCATGGGTTAATAAAAGGAGGAATATAT | flhDC |
| | ATGCATACATCCGAGTTGCTAAAACA | forward |
| | SEQ ID NO: 215) | |
| vr47 | AAAAAACTCGAGAAAAATTAAACAGCCTGTTCGA | flhDC |
| | TCTGTTCAT SEQ ID NO: 216) | reverse |
| vr394 | CCGCATAGTTAAGCCAGTATACATTTACACTTTAT | pLacGFP |
| | GCTTCCGGCTCGTATAATAAAAAAAAAAGGAGGA | backbone |
| | AAAAAAATGAGTAAAGGAGAAGAACTTTTCA SEQ | forward |
| | ID NO: 217) | |
| vr395 | TCACGTAGCGATAGCGGAGTTACAGATCCTCTTCT | pLacGFP |
| | GAGATGAGTTTTTGTTCTTTGTATAGTTCATCCAT | backbone |
| | GCCAT SEQ ID NO: 218) | reverse |
| vr385 | CTCCGCTATCGCTACGTGA SEQ ID NO: 219) | Pla |
| | | backbone |
| | | forward |
| vr386 | TGTATACTGGCTTAACTATGCGG | Pla |
| | | backbone |
| | SEQ ID NO: 220) | reverse |
| vr424 | GCTTGTCTGCTCCCGGCATCGTACGTTTTCGTTCC | asd forward |
| | ATTGG SEQ ID NO: 221) | |
| vr425 | AGACGGTCACAGCTTGTCTGTATCTGCGTTTACTC | asd reverse |
| | CTGTATTAC SEQ ID NO: 222) | |
| vr426 | ACAGACAAGCTGTGACCGTCT | P1b or P2a |
| | SEQ ID NO: 223) | backbone |
| | | forward |
| vr427 | ATGCCGGGAGCAGACAAGC SEQ ID NO: 224) | P1b or P2a |
| | | backbone |
| | | reverse |
| vr269 | CGCAGCGAGTCAGTGAGCACATGTCACATAAAAC | Pssej- |
| | ACTAGCACT SEQ ID NO: 225) | GFP-myc |
| | | forward |
| vr270 | CGCACAGATGCGTAAGGAGAATTACAGATCCTCT | Pssej- |
| | TCTGAGATGAGTTTTTGTTCTTTGTATAGTTCAT | GFP-myc |
| | CCATGCCATG SEQ ID NO: 226) | reverse |
| vr271 | GCTCACTGACTCGCTGCG SEQ ID NO: 227) | Pla backbone |
| | | reverse |
| vr272 | TTCTCCTTACGCATCTGTGCG | Pla backbone |
| | SEQ ID NO: 228) | forward |
| vr398 | ATCTGTGCGGTATTTCACACCACATGTCACATAAA | Pssej-LysE |
| | ACACTAGCACT SEQ ID NO: 229) | forward |
| vr399 | TACTGAGAGTGCACCATATGCTCACTCCTTCCGCA | Pssej-LysE |
| | CGTAATTT SEQ ID NO: 230) | reverse |
| vr396 | GCATATGGTGCACTCTCAGTA | P1 backbone |
| | SEQ ID NO: 231) | forward |
| vr397 | GGTGTGAAATACCGCACAGAT | P1 backbone |
| | SEQ ID NO: 232) | reverse |

TABLE 3
Plasmids

| | | | Gene | Gene | |
|---|---|---|---|---|---|
| No. | Name | Origin | Maintenance | Circuits | Purpose |
| P1 | flhDC re- | ColE1 | Amp | PBAD-flhDC | Re-expresses flhDC; |
| | expressing | | ASD | Plac-GFP-myc | Constitutively expresses |
| | | | | | GFP |
| P2 | Intracellular lysis | ColE1 | AMP | PsseJ-LysE | Lyses after invasion; |
| | and induced | | ASD | PBAD-flhDC | Re-expresses flhDC; |
| | invasion | | | Plac-GFP-myc | Constitutively expresses |
| | | | | | GFP |
| P3 | flhDC reporting | ColE1 | Amp | PBAD-flhDC | Measures invasion after |
| | | | | PsseJ-GFP-myc | flhDC re-expression |

### Strains

[0281] All engineered strains were based on VNP20009 and strain details can be found in following table.

[0282] Genetic knockouts were created using a modified lambda red recombination procedure (41, 42). The master gene editing strain was created by transforming the plasmid containing the required lambda phage genes, pkd46, into VNP20009 using electroporation.

[0283] Six genomic knockout strains of Salmonella were created. Three of the knockouts were created by growing Salmonella containing pkd46 to an optical density of 0.1 at which point the bacteria were supplemented with 20 mM arabinose to induce expression of lambda genes. When the bacteria reached an optical density of 0.8, 1 microgram of DpnI digested PCR product amplified from pkd4 (vr121/vr309 for ΔflhD,vr318/vr319 for ΔfliGHI, vr432/vr433 for ΔsseJ, vr434/vr435 for ΔsifA) was transformed into the Salmonella through electroporation. Bacteria was recovered in LB for 2 hours at 37° C. and plated on agar plates containing 50 micrograms/ml of kanamycin. Resulting transformants were screened for insertion using antibiotic selection and junction PCR to confirm correct location of genomic deletion. Successful knockouts were then grown at 43° C. to cure the knockout strains of the pkd46 plasmid.

[0284] To create the ΔflhD+ΔfliGHI knockout, the above strain of ΔflhD was retransformed with pkd46 through electroporation, grown to an OD of 0.1 and induced with 20 mM arabinose until the bacteria grew to an OD of 0.8. The fliGHI knockout PCR product was amplified from pkd3 using the primers, vr266 and vr268. The PCR products were DpnI digested and 1 microgram was transformed into the lambda induced ΔflhD strain using electroporation. The bacteria were recovered in LB with 100 micrograms/ml for 2 hours at 37° C. and plated on agar plates containing 33 micrograms/ml of chloramphenicol. Successful transformants were screened as previously described and grown on LB containing 33 micrograms/ml of chloramphenicol overnight at 43° C. to cure the bacteria of pkd46.

[0285] The plasmids created were transformed into the relevant strains using electroporation. These strains are listed in Table 3.

### Mouse Models

[0286] Six week old Balb/C mice from Jackson Laboratories were injected subcutaneously with 1×10W 4T1 tumor cells on the hind flank. Once tumors reached 500 mm³, mice were intravenously injected with either saline or bacteria. Either twenty-four or ninety-six hours after bacterial administration, mice were sacrificed, and tumors, livers and spleens were excised for downstream analysis.

### In Vivo Tumor and Liver Colonization of Salmonella

[0287] To quantify tumor and liver colonization five groups of five Balb/C mice containing subcutaneous 4T1 tumors (˜500 mm³) were intravenously injected via the tail vein with either parental, ΔflhD, ΔfliGHI, or ΔflhD+ΔfliGHI Salmonella. Ninety-six hours after bacterial administration, tumors and livers were excised and homogenized in two volumes (w/v) of sterile PBS. Organ slurries were serially diluted 10-fold, four times for livers and eight time for tumors. 200 ul of each dilution was plated on agar containing the appropriate antibiotic. After drying, plates were incubated overnight at 37 degrees Celsius. Plates containing between 10 and 100 colonies were counted to determine bacterial colonization levels in either the tumor or liver.

### Immunohistochemistry

[0288] Excised tumor sections were fixed in 10% formalin for 3 days. Fixed tumor samples were then stored in 70% ethanol for 1 week. Tumor samples were embedded in paraffin and sectioned into 5 μm sections. Deparaffinization was performed by washing the sectioned tissue three times in 100% xylene, twice in 100% ethanol, once in 95% ethanol, once in 70% ethanol, once in 50% ethanol, and once in DI water. Each wash step was performed for 5 minutes. Antigen retrieval was performed by incubating the tissue sections in 95° C., 20 mM sodium citrate (pH 7.6) buffer for 20 minutes. Samples were left in sodium citrate buffer until the temperature reduced to 40° C. Samples were then rehydrated with two quick (<1 minute) rinses in DI water followed by one five-minute wash in TBS-T.

[0289] Prior to staining, tissue sections were blocked with Dako blocking buffer (Dako) for one hour. Tissue sections were stained to identify Salmonella and GFP with 1:100 dilutions of (1) FITC-conjugated rabbit anti-Salmonella polyclonal antibody (Abcam), and (2) either rat anti-myc monoclonal antibody (Chromotek) or rat anti-GFP monoclonal antibody (Chromotek) in Tris buffered saline with 0.1% Tween 20 (TBS-T) with 2% BSA (FisherScientific). Sections were washed three times in TBS-T w/ 2% BSA and incubated with Alexaflor-568 goat anti-rat secondary antibodies (ThermoFisher). After washing sections three times with TBS-T, 40 μl of prolong gold mountant with DAPI (ThermoFisher) and a cover slip were added to each slide. Slides were incubated at room temperature for 24 hours until the mountant solidified. Histological Detection of Intracellular delivery of GFP to cells in tumors with FID Salmonella

[0290] To identify and quantify GFP delivery to tumor cells, two groups of ten BALB/c mice with 4T1 tumors were injected with 2×10⁶ CFU of FID Salmonella. One group of mice was injected twice with arabinose intraperitoneally to induce flhDC expression while the other group was injected with saline as a control. Ninety-six hours after bacterial injection, mice were sacrificed and tumors, liver and spleens were excised. Tumors were cut in half. One half was fixed and stained for imaging as described in the immunohistochemistry section.

### Cell Culture

[0291] Two cancer cell lines were used: 4T1 murine breast carcinoma cells and LS174T human colorectal carcinoma cells (ATCC, Manassas, VA). All cancer cells were grown and maintained in Dulbecco's Minimal Eagle Medium (DMEM) containing 3.7 g/L sodium bicarbonate and 10% fetal bovine serum. For microscopy studies, cells were incubated in DMEM with 20 mM HEPES buffering agent and 10% FBS. To generate tumor spheroids, single cell suspensions of LS174T cells were transferred to PMMA-coated cell culture flasks (2 g/L PMMA in 100% ethanol, dried before use).

Microfluidic System to Quantify Intracellular Invasion Distribution of flhDC Induced Salmonella

[0292] To quantify invasion into tumor masses, engineered Salmonella were administered to tumor-on-a-chip devices developed in our laboratory (43, 44). Microfluidic tumor-on-a-chip devices were fabricated using negative tone photoresist and PDMS based soft lithography. Master chips were constructed by spin coating a layer of SU-8 2050 onto a silicon wafer at 1250 RPM for 1 minute. This speed corresponded to an SU-8 2050 thickness of 150 μm. The silicon wafer was baked at 65° C. for 5 minutes followed by 95° C. for 30 minutes. Microfluidic designs printed on a high-resolution transparency were placed over the silicon wafer in a mask aligner. The silicon wafer with the overlaid mask was exposed to UV light (22 J/cm²) for 22 seconds. Silicon wafers were baked for 5 minutes at 65° C. followed by 95° C. for 12 minutes. Wafers were then developed in PGMEA developing solution for 10 minutes and/or until microfluidic features were microscopically distinct with sharp and defined edges.

[0293] Soft lithography was used to create the multilayer tumor on a chip device with 12 tumor chambers (two conditions with six chambers each). PDMS (Sylgard 184) at ratios of 9:1 and 15:1 were used for the channel and valve layers, respectively. The channel layer was placed on a spin coater for 1 minute at 220 rpm in order to achieve a PDMS thickness of 200 μm. The silicon wafers were degassed for 45 minutes to eliminate air bubbles in the PDMS. The silicon wafers were baked at 65 degrees for approximately one hour or until both PDMS layers were partially cured. The top valve layer of PDMS was cut and removed from the silicon wafer and aligned on top of the channel layer using a stereomicroscope. The combined layers were baked for one hour at 95° C. in order to covalently bind the two layers. The multilayered PDMS device and a glass slide was plasma treated in a plasma cleaner (Harrick) for 2.5 minutes. Valves were pneumatically actuated with a vacuum pump and the PDMS was placed on the plasma treated glass slide. Valves were actuated until the device was ready for use.

[0294] The tumor-on-a-chip was sterilized with 10% bleach followed by 70% ethanol, each for one hour. Microfluidic chips were equilibrated with media (DMEM with 20 mM HEPES, pH 7.4) for one hour. Valve actuation was used to position tumor spheroids in the tumor chambers. Valves at the rear of the chambers were opened while the efflux channel was closed. After the tumor masses were positioned, the valves were reset so that the rear valves were closed, and the influx and efflux channels were open.

[0295] Prior to administration to the device, flhDC reporting Salmonella were grown in LB with 20 mM arabinose to induce flhDC expression. These Salmonella have inducible flhDC (PBAD-flhDC) and produce GFP when intracellular (PsseJ-GFP). Control (flhDC−) Salmonella of the same strain were grown without arabinose. The bacteria were centrifuged and resuspended in culture medium (DMEM with 20 mM HEPES) at a density of 2×10⁷ CFU/ml. For the induced flhDC+condition, 20 mM arabinose was added to the medium. Bacteria-containing media (flhDC+ and flhDC−; n=6 chambers each) were perfused through the tumor-on-a-chip devices for one hour at 3 μm/min for a total delivery of 2×10⁶ CFU to each device. Bacterial administration was followed by bacteria-free media (with 20 mM HEPES) for 48 hours.

[0296] Devices were imaged at 30-minute intervals. Invasion was quantified at 31 h by measuring GFP expression by invaded bacteria in the tumor masses. Regions of interest were defined around the borders of the tumor masses. The extent of invasion was determined as the average GFP fluorescence intensity in each tumor mass. Intensities were normalized by the intensity of the average tumor mass administered control (flhDC−) Salmonella.

### Microscopy and Image Analysis

[0297] Samples were imaged on a Zeiss Axio Observer Z.1 microscope. Fixed cells on coverslips were imaged with a 100× oil immersion objective (1.4 NA). Tumor sections were images with 10× and 20× objectives (0.3 and 0.4 NA, respectively). Time lapse fluorescence microscopy of live cells in well plates and tumor-chip devices were housed in a humidified, 37° C. environment and imaged with 5×, 10×, 63× or 100× objectives (0.2, 0.3, 1.4 and 1.4 NA, respectively). Fluorescence images were acquired with either 480/525 or 525/590 excitation/emission filters. All images were background subtracted and contrast was uniformly enhanced. All immunocytochemistry image analysis was automated using computational code (MATLAB, Mathworks). Immunohistochemical imaging of bacterial distribution in tumors was automated using MATLAB. Intracellular protein delivery within mouse tumors was visually quantified.

### Infection Assays

[0298] For infection assays, cancer cells were grown on coverslips for fixed-cell imaging. For fixed imaging, glass coverslips were placed in 12-well plates and sterilized with UV light in a biosafety hood for 20 minutes. Mouse 4T1 were seeded on the coverslips at 40% confluency and incubated overnight in DMEM. Concurrently, Salmonella were grown to an optical density (OD; at 600 nm) of 0.8. After incubation, the Salmonella were added to the 4T1 cultures at a multiplicity of infection (MOI) of 10 and allowed to infect the cells for two hours. After this invasion period, the cultures were washed five times with 1 ml of phosphate buffered saline (PBS) and resuspended in 2 ml of DMEM with 20 mM HEPES, 10% FBS and 50 μg/ml gentamycin. The added gentamycin removes extracellular bacteria. After six hours of incubation, the media was removed, and the coverslips were fixed with 10% formalin in PBS for 10 minutes.

### Immunocytochemistry

[0299] Immunocytochemistry was used to obtain detailed images of Salmonella invaded into cancer cells grown on coverslips. After fixing the coverslips with formalin, they were blocked with staining buffer (PBS with 0.1% Tween 20, 1 mM EDTA, and 2% bovine serum albumin (BSA)) for 30 minutes. The Tween 20 in this buffer selectively permeabilizes mammalian cell membranes, while leaving bacterial membranes intact.

[0300] After permeabilization, coverslips were stained to identify Salmonella, released GFP, and vacuolar membranes with (1) rabbit anti-Salmonella polyclonal antibody (Abcam) or FITC-conjugated rabbit anti-Salmonella polyclonal antibody (Abcam) (2) rat anti-myc monoclonal antibody (Chromotek), and (3) rabbit anti-LAMP1 polyclonal antibody (Abcam), respectively. Three different staining combinations were used: (1) Salmonella alone; (2) Salmonella, released GFP and (3) Salmonella, released GFP and vacuoles.

[0301] For Salmonella alone staining (combination 1), coverslips were stained with FITC-conjugated anti-Salmonella antibody at 30° C. for one hour and washed three times with staining buffer.

[0302] For Salmonella, released GFP and vacuole staining (combination 2), coverslips were stained sequentially with anti-LAMP1 primary antibodies at 30° C. for one hour, and washed three times with staining buffer. Coverslips were incubated with Alexaflor-647 chicken anti-rabbit secondary antibodies (ThermoFisher) at a 1:200 dilution for one hour at 30° C. and washed four times with staining buffer. Coverslips were then stained with FITC-conjugated anti-Salmonella antibody and anti-myc primary antibody; and washed three times with staining buffer. Coverslips were incubated with Alexaflor-568 goat anti-rat secondary antibodies (ThermoFisher) at a 1:200 dilution for one hour at 30° C. to identify GFP.

[0303] After all staining, coverslips were washed three times with staining buffer and mounted to glass slides using 20 μl mountant with DAPI (ProLong Gold Antifade Mountant, Thermofisher). Mounted coverslips were cured overnight at room temperature.

### Quantification of Vacuolar Fraction, Extent of Invasion, and Lysis of Engineered Salmonella

[0304] To quantify what fraction of intracellular, flhDC expressing Salmonella were located within vacuoles, coverslips were infected with either the parental control strain of Salmonella or FID Salmonella as described in the infection assay section. Coverslips were then stained for LAMP1, Salmonella and nuclei as described in the immunocytochemistry section. Coverslips were imaged at 100× as described in the microscopy and image analysis section. Between ten and twenty cells from either the control group or FID treated group were analyzed. Salmonella either colocalized or bordered very closely by LAMP1 were defined as inside vacuoles. Salmonella that were not localized with LAMP1 closely bordering the bacteria were defined as cytosolic.

### Results

[0305] Controlling flhD Expression Improves Tumor Targeting of Salmonella

[0306] Suppressing flhD expression of Salmonella in systemic circulation improved tumor colonization of the bacteria. While tumor colonization levels were 10⁸ CFU/gram of tumor for both control and ΔflhD Salmonella, liver colonization of ΔflhD Salmonella was reduced ten-fold as compared to control (FIG. 5A; *, P<0.05). When flhDC was overexpressed before injection, however, tumor colonization was impaired compared to a bacterial control (FIG. 5B). These results indicated that flhDC expression before injection increased the clearance rate of Salmonella in the blood. However, suppression of flhDC before injection increased tumor colonization and specificity of Salmonella.

[0307] A lack of flhDC activity, not just a lack of flagellar expression, reduced liver colonization while maintaining similar tumor colonization levels of Salmonella. Mice were infected with three different Salmonella strains: ΔflhD, ΔfliGHI, and ΔflhD+ΔfliGHI. The AfiGHI strain lacks flagella but retains flhDC activity. The ΔflhD and ΔflhD+ΔfliGHI, which lack flhDC activity, both colonized livers 8.5 and 20-fold less than the flagellar deficient, ΔfliGHI, strain, respectively (FIG. 5C; *, P<0.05). However, tumor colonization levels of all three strains were not different (FIG. 5D). These results indicated that reduced flhDC activity, and not merely a lack of flagella, increased tumor specificity of Salmonella.

flhDC Expression Increases Intratumoral Dispersion of Salmonella

[0308] Suppressing expression of flhDC caused Salmonella to predominantly colonize and grow within tumor necrosis. flhDC uninduced were systemically administered into mice and half of the mice were administered arabinose to induce flhDC expression (FIG. 6A). Salmonella not expressing flhDC were not motile and as a result, formed spatially separated, dense colonies predominantly within tumor necrosis (yellow arrow, FIG. 6B). A small fraction of these colonies, however, were located within viable tumor tissue (green arrows, FIG. 26B). The fraction of these dense colonies present in necrosis was 75% percent as compared with 25% percent of colonies in viable tumor tissue (FIG. 6C). If it is assumed that each spatially segregated, dense colony originated from a single bacterium, the growth rate of colonies in necrosis was 0.12 hr-1 as compared to a slightly reduced rate of 0.11 hr-1 within viable tissue (*, P<0.05; FIG. 6D). These bacterial growth rates correspond to doubling times of 6 hours within necrosis and 6.5 within viable tumor tissue (*, P<0.05; FIG. 6E), which is consistent with previous estimates (45). These results indicate that Salmonella heavily favor colonization and growth within tumor necrosis as compared with viable tumor tissue.

[0309] Reexpressing flhDC within intratumoral Salmonella increased dispersion and tumor coverage of the bacteria. ΔflhD Salmonella with the PBAD-flhDC genetic circuit were injected intravenously into 4T1 tumor bearing mice and administered two doses of arabinose intraperitoneally to induce flhDC expression in Salmonella (FIG. 6A). flhDC induction of intratumoral Salmonella increased both the bacterial colony size along with bacterial coverage within the tumor (FIG. 6F). The colony size of flhDC reexpressing Salmonella increased 1.5-fold as compared with an uninduced control (*, P<0.05; FIG. 6G). While flhDC uninduced Salmonella formed dense, tightly packed colonies (top panel, FIG. 6H), a larger number of flhDC induced bacteria were located outside of these dense colonies (bottom panel, green arrows, FIG. 6H). The number of Salmonella outside of a dense, central colonies (termed satellite colonies) increased two-fold when flhDC was induced within intratumoral Salmonella (*, P<0.05; FIG. 6I). These results indicate that intratumoral induction of flhDC in Salmonella enables the bacteria to migrate away from dense colonies within tumor necrosis and towards viable cancer cells.

In Situ Expression of flhDC is Needed to Increase Intracellular Invasion of Salmonella into Spatially Distant Cells

[0310] Reexpression of flhDC increased spatial distribution of intracellular Salmonella within tumors. A tumor-on-a-chip device was used to quantify spatial distribution of intracellular Salmonella (FIG. 7A). These Salmonella expressed flhDC with arabinose supplementation and GFP after intracellular invasion (Intracellular reporting Salmonella, IR Sal). Arabinose induction of flhDC enabled broad distribution of intracellular expressing GFP Salmonella within in vitro tumor masses (+flhDC, FIG. 7B). However, uninduced ΔflhD Salmonella (−flhDC) were detected at very low concentrations throughout tumor masses (white arrow, FIG. 7B). The presence of intracellular Salmonella gradually increased deeper into tumor tissue and was enriched 140-fold in +flhDC as compared to −flhDC Salmonella for x>0.5 (**, P<0.01; ***, P<0.001; FIG. 7C). The overall amount of flhDC expressing, IR Salmonella increased exponentially over time as compared to the −flhDC control (*, P<0.05; **, P<0.01; ***, P<0.001; FIG. 7D). This indicated that flhDC induction increased the coverage of intracellular Salmonella in tumor masses.

[0311] When +flhDC IR Sal (FIG. 7E) was administered into mice and arabinose induced to express flhDC(FIG. 7F), a greater fraction of bacteria was located intracellularly (Induced, white squares; FIG. 7F). Intracellular invasion of flhDC reexpressing Salmonella increased 2.3-fold over the −flhDC IR Sal control (*, P<0.05; FIG. 7G).

[0312] Euclidean distance mapping of histoogical sections, which quantifies the proximity of every location within a tumor to the nearest bacterium, was used to quantify the distribution of intracellular bacteria. The spatial coverage of intracellular bacteria was greater after flhDC induction as indicated by Euclidean distance modeling of histological sections (FIG. 7H). Salmonella were distributed 1.6-fold more after flhDC induction (*, P<0.05; FIG. 7I). These results indicated that flhDC expression increases intracellular invasion by positioning more bacteria near a greater number of viable cancer cells. In addition, flhDC expression increases intracellular invasion in a flagella and T3SS-1 driven manner (10).

Controlling flhDC Expression Improves GFP Delivery Distribution within Tumors

[0313] Induction of flhDC within intratumoral engineered Salmonella increased protein delivery over a larger area of cells. Induced Salmonella delivered protein into a broad, spatially distributed set of cells within tumors (FIG. 8A). Euclidean distance mapping analysis of intratumoral delivery demonstrated that flhDC induction (flhDC intracellular delivering Salmonella; FID Sal) increased spatial delivery coverage 1.6-fold as compared to flhDC uninduced (Uninduced intracellular delivering Salmonella; UID Sal) Salmonella (***, P<0.001; FIG. 8B). These results demonstrate that flhDC induction increased spatial coverage in tumors (FIG. 7H, I), which, enabled the bacteria to intracellularly deliver protein into broadly distributed cells within tumors.

### Engineered Salmonella is Superior in Tumor Colonization and Protein Delivery Compared to Exclusively Cytosolic Salmonella

[0314] Engineered Salmonella colonized tumors and delivered significantly more protein inside cancer cells compared to conventionally used, cytosolic Salmonella. As demonstrated, ΔflhD Salmonella did not colonize tumors less than a control (FIG. 5A). However, ΔsifA Salmonella colonized tumors ten-fold less than the control (*, P<0.05; FIG. 9A). Liver colonization was also reduced ten-fold between ΔsifA and control Salmonella (*, P<0.05; FIG. 9B) indicating that the ΔsifA strain exhibited overall poor fitness in vivo. Using a selective staining technique to detect bacterial lysis and protein delivery as previously described, engineered Salmonella visibly lysed more than ΔsifA Salmonella inside cells at all time points (FIG. 9C). FID Sal lysed 18-fold more than ΔsifA Salmonella (FIG. 9D; **, P<0.01). Cytosolic localization is important for protein therapies to have biological activity and anti-cancer activity. However, these results demonstrate that predominantly cytosolic Salmonella are not well suited for therapeutic delivery. This is a result of a combination of poor tumor colonization, poor systemic infectivity in vivo and poor lysis efficiency of ΔsifA compared to FID Sal. The ΔsifA strain of Salmonella fails to effectively colonize tumors and therefore, is not advantageous for intracellular protein delivery.

flhDC Expression Reduces Lysis Efficiency within Intracellular Salmonella

[0315] flhDC expression in Salmonella affects intracellular lysis and protein delivery after invasion. To understand this dynamic, cancer cells were infected with control lysing Salmonella (ID Sal) or lysing Salmonella reexpressing flhDC (FID-Sal) (FIG. 10A). As expected, FID Sal invaded cancer cells three times more than ID Salmonella (FIG. 10B, C; **, P<0.01). However, FID Sal lysed 33% less than control ID Sal (FIG. 10D; **, P<0.01). To understand why, the vacuolar/cytosolic distribution of control and flhDC expressing Salmonella was quantified after cancer cell infection (FIG. 10E). While most control Salmonella were contained in vacuoles (colocalized green and red), a larger percentage of flhDC reexpressing Salmonella were cytosolic (green only, FIG. 10F). On a population level, 90% of control were in vacuoles compared to 70% of flhDC reexpressing Salmonella (FIG. 10G). As a result, ID Salmonella were more likely to remain in vacuoles and lyse (white arrows, FIG. 10H) while a small fraction of FID Sal were more likely to escape the vacuole and remain intact (light blue arrows, FIG. 10I). In vivo, FID Sal qualitatively demonstrated a similar phenomenon (FIG. 10J). Unlysed and intracellular FID Sal were distributed throughout several cells (white arrows), likely, indicating that the bacteria were hyper-replicating in the cytoplasm of the tumor cells. These results indicate that flhDC induction increases invasion but decreases lysis efficiency of engineered Salmonella, likely because of vacuolar escape.

Vacuolar Retention of flhDC Overexpressing Salmonella Rescues Lysis and Protein Delivery Efficiency

[0316] Overexpressing flhDC in a vacuole escape impaired strain of engineered Salmonella rescued lysis efficiency and overall intracellular protein delivery. It was previously demonstrated that engineered ΔsseJ Salmonella intracellularly lysed with high efficiency. It was therefore hypothesized that overexpressing flhDC in lysing ΔsseJ Salmonella (ΔsseJ FID Sal) would rescue lysis efficiency while maintaining high levels of invasion. Cells infected with ΔsseJ FID Sal exhibited an increase in invaded, lysed bacteria (white arrow, FIG. 11A). The ΔsseJ FID Sal invaded cancer cells 1.5-fold more than FID Sal and three-fold more than ID Sal (FIG. 11B, **, P<0.01). Intracellular ΔsseJ FID Sal also lysed 25% more efficiently than FID Sal alone (FIG. 11C; **, P<0.01). The combination of these two phenomena (increased invasion and improved lysis) of the engineered strain increased overall protein delivery 2.5-fold over FID Sal (FIG. 11D; **, P<0.01). This data demonstrated that the reduced lysis efficiency resulting from flhDC activity could be rescued by overexpressing the transcription factor in Salmonella engineered to remain in vacuoles.

### Conclusions

[0317] Modulating flhDC expression in engineered Salmonella had broad implications for intracellular therapeutic delivery within tumors (FIG. 12). Salmonella devoid of flhDC expression colonized tumors more selectively. However, overexpression of the transcription factor within systemic Salmonella decreased tumor colonization of the bacteria. Controlled expression of flhDC in tumors increased spatial distribution of extracellular and intracellular Salmonella. While flhDC expression reduced intracellular lysis efficiency of engineered Salmonella, overexpressing the transcription factor in a vacuolar resident, ΔsseJ, strain rescued lysis efficiency and improved overall protein delivery in tumor cells. Together, results demonstrate the modulating flhDC expression in therapeutic Salmonella improves several driving features of protein delivery in tumors (FIG. 12).

### Discussion

[0318] It is shown herein that controlling flhDC expression of engineered bacteria maintains high colonization levels, improves tumor specificity and increases protein delivery distribution within tumors. Expression of flhDC also decreased intracellular lysis efficiency but was rescued by overexpressing the transcription factor in a vacuole localized strain (ΔsseJ) of Salmonella. The combination of the two genetic engineering strategies increased overall intracellular protein delivery.

[0319] The colonization pattern of flhDC uninduced Salmonella suggests that only a few hundred single bacteria infiltrate tumors and grow in situ out of the two million that are injected. These ratios are corroborated by earlier work demonstrating that one out of ten thousand bacteria adhere to tumor vasculature (46). In histological samples flhDC uninduced Salmonella form spatially separated colonies overwhelmingly localized to tumor necrosis (FIG. 6B, C). Each of these colonies could originate from clonal expansion of a single bacteria that managed to colonize the tumor. If this is the case, it would suggest that bacterial influx into tumors occurs as a rare event, is strongly assisted by extensive necrosis, and is the rate limiting step of tumor colonization. Such a rare bacterial infiltration event could explain why tumor colonization is highly variable within populations of mice or humans as described previously (47). These results could explain why extensive tumor colonization was predominantly detected predominantly in the presence of tumor necrosis in humans (47). Combining tumor vascular disrupting agents with Salmonella could therefore reduce treatment variability between patients and enable effective colonization of small, necrosis deficient primary and metastatic tumors.

[0320] Two strategies could be used to robustly initiate bacterial colonization within tumors: (1) Co-administering bacteria along with a mild TNF-alpha inducer as previously described (48) or (2) genetically modifying Salmonella to evade systemic innate immune recognition (e.g., flhDC modulation). In scenario (1) as previously demonstrated, administration with lipid A (a known TNF-alpha inducing agent) did not cause septic shock but increased vascular permeability and therefore, could have increased the probability of bacterial infiltration into tumors across a large number of mice. In scenario (2), flhDC suppression of injected Salmonella could help the bacteria evade innate immune detection of flagella in systemically circulating bacteria. This could enable bacteria to persist longer systemically without causing septic shock. Longer systemic persistence could, in turn, increase the probability of bacterial infiltration into tumors.

[0321] Wild type Salmonella are likely not optimized to deliver therapies intracellularly within tumors. One reason for this might be that necrotic tumor tissue facilitates cecile and non-motile colonization of Salmonella. The data suggests that tumors select for non-motile and likely, non-flagellated bacteria since flagellated bacteria minimally colonize tumors (FIG. 5B) likely due to innate immune mediated clearance (8, 9). The flhDC uninduced bacteria were not impaired in colonization levels as compared to the control strain (FIG. 5D). Moreover, flhDC uninduced bacteria clustered in densely packed colonies largely located within tumor necrosis (FIG. 6B). This suggests that Salmonella have a higher affinity to colonize necrosis rather than viable tissue and that external control is required to enable Salmonella to invade viable tumors cells in an flhDC dependent manner. By controllably activating flhDC expression in intratumoral Salmonella, it was demonstrated that a significant fraction of these bacteria invaded and delivered protein into a spatially distributed set of cells.

[0322] Vacuolar residence could also aid in preventing premature clearance before tumor accumulation in addition to enabling lysis of engineered Salmonella. The current paradigm for intracellular, cytosolic therapeutic delivery is to enable Salmonella to escape the vacuole and directly invade the cytosol through deletion of the sifA gene (20). Similarly, bacterial variants expressing listeriolysin O have also been used to enable vacuolar escape of therapeutic Salmonella (49-51). However, it was determined that unnatural cytosolic escape of Salmonella (ΔsifA) reduced tumor colonization 100-fold compared to the parental strain (FIG. 9A). This is likely because cytosolic pathogens elicit a strong antimicrobial and NF-kB dependent immune response that is detrimental to bacterial fitness in vivo (21, 52-55). The ΔsifA bacteria also lysed 18-fold less than FID Salmonella. These results indicate that the engineered strain significantly improved the delivery potential Salmonella as compared to existing cytosolic delivery methods.

[0323] The engineered bacterial system described herein shares similarities with strains of Salmonella Typhi that have evolved to systemically infect human hosts. Humans serve as the natural host for Salmonella Typhi and upon ingestion, the bacteria stealthily translocate from the gut into systemic circulation without attracting a significant initial immune response (30). The bacteria can circulate systemically for extended periods of time without causing septic shock (30). The typhoidal strain accomplishes this by encoding a capsular regulatory protein, TviA. The transcription factor encodes for the Vi capsule that masks bacterial LPS (56). In addition, TviA suppresses flagellar and T3SS-1 activity in systemically circulating bacteria through repression of flhDC and HiLA expression, respectively 57. Masking of the LPS and downregulation of flagellar and T3SS-I activity leads to evasion of innate immune recognition (57). The instant delivery strain of Salmonella also has a modified LPS through deletion of msbB which prevents sepsis. In addition, the expression of flhDC, which activates flagellar and to a lesser extent, T3SS-1 synthesis (10), is suppressed upon systemic administration of the engineered Salmonella. The engineered strain of Salmonella and Salmonella Typhi also share the similarity that both types of bacteria reside mostly within the intracellular vacuole. Residence within the intracellular vacuole prevents bacterial detection by cytosolic, innate immune sensors like nod-like receptors, ubiquitin and NF-kB components. These genetic modifications likely act to mask common pathogen associated molecular patterns associated with Salmonella and increase systemic persistence without causing any adverse immune responses.

### BIBLIOGRAPHY

[0324] 1. Uhlen, M., et al., Proteomics. Tissue-based map of the human proteome. Science, 2015. 347(6220): p. 1260419.
[0325] 2. Au, J. L., et al., Delivery of cancer therapeutics to extracellular and intracellular targets: Determinants, barriers, challenges and opportunities. Adv Drug Deliv Rev, 2016. 97: p. 280-301.
[0326] 3. Gauger, E. J., et al., Role of motility and the flhDC Operon in Escherichia coli MG1655 colonization of the mouse intestine. Infect Immun, 2007. 75(7): p. 3315-24.
[0327] 4. Wang, X. and T. K. Wood, IS5 inserts upstream of the master motility operon flhDC in a quasi-Lamarckian way. ISME J, 2011. 5(9): p. 1517-25.
[0328] 5. Macnab, R. M., Genetics and biogenesis of bacterial flagella. Annu Rev Genet, 1992. 26: p. 131-58.
[0329] 6. Winter, S. E., et al., The TviA auxiliary protein renders the Salmonella enterica serotype Typhi RcsB regulon responsive to changes in osmolarity. Mol Microbiol, 2009. 74(1): p. 175-193.
[0330] 7. Winter, S. E., et al., The Salmonella enterica serotype Typhi regulator TviA reduces interleukin-8 production in intestinal epithelial cells by repressing flagellin secretion. Cell Microbiol, 2008. 10(1): p. 247-61.
[0331] 8. Yoon, S. I., et al., Structural basis of TLR5-flagellin recognition and signaling. Science, 2012. 335(6070): p. 859-64.
[0332] 9. Franchi, L., et al., Cytosolic flagellin requires Ipaf for activation of caspase-1 and interleukin 1beta in salmonella-infected macrophages. Nat Immunol, 2006. 7(6): p. 576-82.
[0333] 10. Raman, V., et al., The motility regulator flhDC drives intracellular accumulation and tumor colonization of Salmonella. J Immunother Cancer, 2019. 7(1): p. 44.
[0334] 11. Benoun, J. M., et al., Optimal protection against Salmonella infection requires noncirculating memory. Proc Natl Acad Sci USA, 2018. 115(41): p. 10416-10421.
[0335] 12. Finn, C. E., et al., A second wave of Salmonella T3SS1 activity prolongs the lifespan of infected epithelial cells. PLoS Pathog, 2017. 13(4): p. e1006354.
[0336] 13. Singer, H. M., M. Erhardt, and K. T. Hughes, RflM functions as a transcriptional repressor in the autogenous control of the Salmonella Flagellar master operon flhDC. J Bacteriol, 2013. 195(18): p. 4274-82.
[0337] 14. Zeng, H., et al., Flagellin is the major proinflammatory determinant of enteropathogenic Salmonella. J Immunol, 2003. 171(7): p. 3668-74.
[0338] 15. Stecher, B., et al., Flagella and chemotaxis are required for efficient induction of Salmonella enterica serovar Typhimurium colitis in streptomycin-pretreated mice. Infect Immun, 2004. 72(7): p. 4138-50.
[0339] 16. Li, Z., et al., Pyroptosis of Salmonella Typhimurium-infected macrophages was suppressed and elimination of intracellular bacteria from macrophages was promoted by blocking QseC. Sci Rep, 2016. 6: p. 37447.
[0340] 17. Stritzker, J., et al., Enterobacterial tumor colonization in mice depends on bacterial metabolism and macrophages but is independent of chemotaxis and motility. Int J Med Microbiol, 2010. 300(7): p. 449-56.
[0341] 18. Yang, N., et al., Attenuated Salmonella typhimurium carrying shRNA-expressing vectors elicit RNA interference in murine bladder tumors. Acta Pharmacol Sin, 2011. 32(3): p. 368-74.
[0342] 19. Guo, H., et al., Targeting tumor gene by shRNA-expressing Salmonella-mediated RNAi.

[0343] Gene Ther, 2011. 18(1): p. 95-105.
[0344] 20. Camacho, E. M., et al., Engineering Salmonella as intracellular factory for effective killing of tumour cells. Sci Rep, 2016. 6: p. 30591.
[0345] 21. van Wijk, S. J. L., et al., Linear ubiquitination of cytosolic Salmonella Typhimurium activates NF-kappaB and restricts bacterial proliferation. Nat Microbiol, 2017. 2: p. 17066.
[0346] 22. Bierschenk, D., et al., The Salmonella pathogenicity island-2 subverts human NLRP3 and NLRC4 inflammasome responses. J Leukoc Biol, 2019. 105(2): p. 401-410.
[0347] 23. Steele-Mortimer, O., The Salmonella-containing vacuole: moving with the times. Curr Opin Microbiol, 2008. 11(1): p. 38-45.
[0348] 24. Liss, V., et al., Salmonella enterica Remodels the Host Cell Endosomal System for Efficient Intravacuolar Nutrition. Cell Host Microbe, 2017. 21(3): p. 390-402.
[0349] 25. Chakravortty, D., I. Hansen-Wester, and M. Hensel, Salmonella pathogenicity island 2 mediates protection of intracellular Salmonella from reactive nitrogen intermediates. J Exp Med, 2002. 195(9): p. 1155-66.
[0350] 26. Eswarappa, S. M., et al., Division of the Salmonella-containing vacuole and depletion of acidic lysosomes in Salmonella-infected host cells are novel strategies of Salmonella enterica to avoid lysosomes. Infect Immun, 2010. 78(1): p. 68-79.
[0351] 27. Ruiz-Albert, J., et al., Complementary activities of SseJ and SifA regulate dynamics of the Salmonella typhimurium vacuolar membrane. Mol Microbiol, 2002. 44(3): p. 645-61.
[0352] 28. Hallstrom, K. and B. A. McCormick, Salmonella Interaction with and Passage through the Intestinal Mucosa: Through the Lens of the Organism. Front Microbiol, 2011. 2: p. 88.
[0353] 29. Parkhill, J., et al., Complete genome sequence of a multiple drug resistant Salmonella enterica serovar Typhi CT18. Nature, 2001. 413(6858): p. 848-52.
[0354] 30. Dougan, G. and S. Baker, Salmonella enterica serovar Typhi and the pathogenesis of typhoid fever. Annu Rev Microbiol, 2014. 68: p. 317-36.
[0355] 31. Hodak, H. and J. E. Galan, A Salmonella Typhi homologue of bacteriophage muramidases controls typhoid toxin secretion. EMBO Rep, 2013. 14(1): p. 95-102.
[0356] 32. Spano, S., J. E. Ugalde, and J. E. Galan, Delivery of a Salmonella Typhi exotoxin from a host intracellular compartment. Cell Host Microbe, 2008. 3(1): p. 30-8.
[0357] 33. Choi, J., et al., <em>Salmonella</em> pathogenicity island 2 expression negatively controlled by EIIA<sup>Ntr</sup>-SsrB interaction is required for <em>Salmonella</em>virulence. Proceedings of the National Academy of Sciences, 2010. 107(47): p. 20506-20511.
[0358] 34. Zhang, K., et al., Minimal SPI1-T3SS effector requirement for Salmonella enterocyte invasion and intracellular proliferation in vivo. PLoS Pathog, 2018. 14(3): p. e1006925.
[0359] 35. Smith, C., et al., Mapping the Regulatory Network for Salmonella enterica Serovar Typhimurium Invasion. MBio, 2016. 7(5).
[0360] 36. Brawn, L. C., R. D. Hayward, and V. Koronakis, Salmonella SPI1 effector SipA persists after entry and cooperates with a SPI2 effector to regulate phagosome maturation and intracellular replication. Cell Host Microbe, 2007. 1(1): p. 63-75.
[0361] 37. Xu, Y., et al., A Bacterial Effector Reveals the V-ATPase-ATG16L1 Axis that Initiates Xenophagy. Cell, 2019. 178(3): p. 552-566 e20.
[0362] 38. Chong, A., et al., A role for the Salmonella Type III Secretion System 1 in bacterial adaptation to the cytosol of epithelial cells. Mol Microbiol, 2019. 112(4): p. 1270-1283.
[0363] 39. Ilyas, B., et al., Regulatory Evolution Drives Evasion of Host Inflammasomes by Salmonella Typhimurium. Cell Rep, 2018. 25(4): p. 825-832 e5.
[0364] 40. Swofford, C. A., N. Van Dessel, and N. S. Forbes, Quorum-sensing Salmonella selectively trigger protein expression within tumors. Proc Natl Acad Sci USA, 2015. 112(11): p. 3457-62.
[0365] 41. Mosberg, J. A., et al., Improving lambda red genome engineering in Escherichia coli via rational removal of endogenous nucleases. PLoS One, 2012. 7(9): p. e44638.
[0366] 42. Mosberg, J. A., M. J. Lajoie, and G. M. Church, Lambda red recombineering in Escherichia coli occurs through a fully single-stranded intermediate. Genetics, 2010. 186(3): p. 791-9.
[0367] 43. Toley, B. J. and N. S. Forbes, Motility is critical for effective distribution and accumulation of bacteria in tumor tissue. Integr Biol, 2012. 4(2): p. 165-76.
[0368] 44. Walsh, C. L., et al., A multipurpose microfluidic device designed to mimic microenvironment gradients and develop targeted cancer therapeutics. Lab on a chip, 2009. 9: p. 545-54.
[0369] 45. Leschner, S., et al., Tumor invasion of Salmonella enterica serovar Typhimurium is accompanied by strong hemorrhage promoted by TNF-alpha. PLoS One, 2009. 4(8): p. e6692.
[0370] 46. Forbes, N. S., et al., Sparse initial entrapment of systemically injected Salmonella typhimurium leads to heterogeneous accumulation within tumors. Cancer Res, 2003. 63(17): p. 5188-93.
[0371] 47. Toso, J. F., et al., Phase I study of the intravenous administration of attenuated Salmonella typhimurium to patients with metastatic melanoma. J Clin Oncol, 2002. 20(1): p. 142-52.
[0372] 48. Zhang, M. and N. S. Forbes, Trg-deficient Salmonella colonize quiescent tumor regions by exclusively penetrating or proliferating. J Control Release, 2015. 199: p. 180-9.
[0373] 49. Critchley, R. J., et al., Potential therapeutic applications of recombinant, invasive E. coli.

[0374] Gene Ther, 2004. 11(15): p. 1224-33.
[0375] 50. Critchley-Thorne, R. J., A. J. Stagg, and G. Vassaux, Recombinant Escherichia coli expressing invasin targets the Peyer's patches: the basis for a bacterial formulation for oral vaccination. Mol Ther, 2006. 14(2): p. 183-91.
[0376] 51. Higgins, D. E., N. Shastri, and D. A. Portnoy, Delivery of protein to the cytosol of macrophages using Escherichia coli K-12. Mol Microbiol, 1999. 31(6): p. 1631-41.
[0377] 52. Nelson, R. H. and D. E. Nelson, Signal Distortion: How Intracellular Pathogens Alter Host Cell Fate by Modulating NF-kappaB Dynamics. Front Immunol, 2018. 9: p. 2962.
[0378] 53. Rahman, M. M. and G. McFadden, Modulation of NF-kappaB signalling by microbial pathogens. Nat Rev Microbiol, 2011. 9(4): p. 291-306.
[0379] 54. Gaudet, R. G., et al., Innate Recognition of Intracellular Bacterial Growth Is Driven by the TIFA-Dependent Cytosolic Surveillance Pathway. Cell Rep, 2017. 19(7): p. 1418-1430.
[0380] 55. Liu, T., et al., NF-kappaB signaling in inflammation. Signal Transduct Target Ther, 2017. 2.
[0381] 56. Hu, X., et al., Vi capsular polysaccharide: Synthesis, virulence, and application. Crit Rev Microbiol, 2017. 43(4): p. 440-452.
[0382] 57. Winter, S. E., et al., Salmonella enterica Serovar Typhi conceals the invasion-associated type three secretion system from the innate immune system by gene regulation. PLoS Pathog, 2014. 10(7): p. e1004207.

### Example III

[0383] Chromosomal Integration of flhD in EBV-002.

[0384] The cell invasive capability of EBV-002 containing a single, chromosomal copy of PBAD-flhDC was assessed. Chromosomal integration of an inducible version of flhDC can create a master delivery vehicle that could be used to deliver any therapy into a tumor. Creating a single master delivery vehicle can streamline the manufacturing process of any EBV based therapy. To this end, a single copy of PBAD-flhDC was integrated in place of the endogenous flhDC gene within VNP20009 Salmonella. This chromosomally integrated strain was grown with arabinose to activate flhDC expression and used to infect cancer cells. The chromosomally integrated VNP20009 invaded cancer cells to similar levels as the bacteria containing episomal copies of flhDC (FIG. 13A). The chromosomal knockin of flhDC also was similarly inducible as compared to Salmonella with episomal PBAD-flhDC (FIG. 13B). This result indicated that the flhDC inducible genetic circuit could be genomically integrated in order to create a master EBV-002 delivery vehicle.

### Development of a Clinical Strain of EBV-002.

[0385] A clinically compatible strain of EBV-002 was created by controlling activation of flhDC with salicylic acid, the active ingredient in aspirin (FIG. 14). Since flhDC is the main transcription factor controlling flagellar synthesis, chemotaxis and motility, bacteria are highly sensitive to even low expression levels of the protein. As a result, it was hypothesized that expression levels in the uninduced state would need to be tightly repressed in order to fully suppress uninduced cell invasion. To test this hypothesis, four different flhDC inducible EBV-002 strains were produced: salicylic induced 1) flhD, 2) flhD containing a weakly active ssrA degradation sequence, 3) flhD containing a moderately active ssrA degradation sequence and 4) flhD containing a highly active degradation tag (FIG. 14). The purpose of these degradation tags was to eliminate uninduced flhD activity that was a result of leaky expression from the pSal promoter. The intracellular invasion rates of each of these four strains were compared to the PBAD inducible version of flhDC. As expected, sample (1) was highly motile and invasive, with or without salicylic acid induction (FIG. 14B) indicating that the salicylic acid promoter was leaky. Samples (2), (3) and (4) only invaded cells after salicylic acid induction and were completely non-invasive otherwise. However, samples (2) and (3) were the most intracellularly invasive after aspirin induction (FIG. 14B). Most importantly, strains (2) and (3) were more invasive as compared to the PBAD inducible version of EBV-002 (FIG. 14B). These results demonstrate that the salicylic acid induction circuit was optimized to express flhD and regulate intracellular invasion of EBV-002 into cancer cells.

[0386] Sample (2) was characterized since this strain of EBV-002 had the highest range of activation between uninduced and induced samples. The induced bacteria swam a significantly longer distance as compared to uninduced EBV-002, which, remained stationary (FIG. 15A). Salicylate induced EBV-002 swam 12.7-fold farther than the uninduced control (***, P<0.001; FIG. 15B). This indicated that the salicylic acid inducible genetic circuit could robustly control flhDC activity in the clinical EBV-002 strain. As expected, the salicylic acid induced, clinical strain of EBV-002 invaded cancer cells 30 times more than the uninduced control (***, P<0.001; FIG. 15C, D). These results indicate that expressing flhD with a weakly active degradation tag using salicylic acid enabled the greatest control of intracellular invasion of EBV-002.

[0387] After determining which version of pSal-flhD was most effective at invading cancer cells with salicylic acid induction, the lowest amount of salicylic acid needed to enable intracellular invasion was determined next. EBV-002 was induced with either 10 nanomolar (nM), 100 nM, 500 nM, 1 micromolar (uM) or 10 uM salicylic acid and infected cancer cells with each of these strains. It was determined that a 500 nM concentration of salicylic acid was needed to enable intracellular invasion of EBV-002 (FIG. 16). This result is significant because it indicates that the induction threshold for EBV-002 is well within the concentration range of salicylic acid found in the blood stream (10-50 uM) after a person orally ingests aspirin. Together, these results indicate that EBV-002 is ready for use as an intracellular delivery vehicle within human tumors. Incorporation of the ΔsseJ mutation into EBV-002 to create EBV-003.

[0388] The ΔsseJ mutation was previously demonstrated to significantly increased lysis efficiency of the EBV strain. To this end, the EBV-002 strain containing the same salicylic acid inducible flhDC gene as well as the intracellular lysis cassette was additionally engineered with the ΔsseJ mutation in order to create EBV-003.

### In Vivo Efficacy of EBV-003.

[0389] Biodistribution and tumor selective protein delivery were assessed in mice bearing subcutaneous 4T1 tumors. Balb/C mice with ˜750 mm³ subcutaneous tumors were intravenously injected with 1×10⁷ CFU of EBV-003. At 72 hours p.i., mice were intraperitoneally injected with 5 mg of salicylic acid to induce flhDC expression within intratumoral bacteria. 24 hours later, mice were sacrificed and tumors, livers, and spleens were excised for analysis. Colonization and protein delivery of EBV-003 was compared to EBV-001 to assess any improvements. After colonization, EBV-003 colonized tumors 10.7-fold more than EBV-001 while keeping spleen and liver colonization unchanged (FIG. 17A, **, P<0.01). On average, EBV-003 delivered 31-fold more protein into tumor cells as compared to EBV-001 (FIG. 17B). Protein delivery was not, however, detected in the spleen or livers with either strain. These results demonstrate that EBV-003 is significantly more effective at colonizing and delivering protein selectively into tumors while sparing healthy tissue.

[0390] To determine whether EBV-003 intracellularly invaded cancer cells after salicylic acid induction in vivo, female balb/c mice were subcutaneously injected with 4T1 tumors. Once tumors were 500 mm³, the mice were injected with 1×10⁶ CFUs via the tail vein. Seventy-two hours after bacterial administration, seven of the mice were intraperitoneally injected with 5 mg of sodium salicylate while four were given a saline injection as a control. Twenty-four hours after salicylic acid administration, the mice were sacrificed, tumors were excised, fixed and stained for Salmonella. Histological examination revealed that salicylic acid induction increased intracellular invasion of viable cancer cells within quiescent tumor tissue. More bacteria (Red Xs, FIG. 18A) were distributed across the quiescent tumor tissue after induction with salicylic acid (FIG. 18B). Salicylic acid induction resulted in a two-fold increase in cancer cells with intracellular EBV-003 as compared to the uninduced control (*, P<0.05; FIG. 18C). These results indicated that EBV-003 could be induced to invade cells using a therapeutic dose of salicylic acid.

[0391] Intracellular protein delivery with EBV-003 was also evaluated with and without salicylate induction. After salicylic acid induction, protein delivery was detected in five out of six tumors within the transition zones where tumor cells are rapidly dividing (white arrows, FIG. 19A). Whereas, delivery was only detected within the transition zone in one of the four uninduced, control mice (FIG. 19B). These results demonstrated that salicylate induction of EBV-003 enabled intracellular protein delivery in vivo.

[0392] In vivo colonization, invasion and protein delivery of EBV-003 in spontaneous breast cancer metastasis in the liver. The EBV-003 strain colonized, invaded and delivered protein selectively into metastatic breast cancer within the liver (FIG. 20). All dense bacterial colonies were only found within the metastatic breast cancer lesions within the liver (white outlined colonies, FIG. 20A). Moreover, 85% of these colonies were immediately adjacent, or within actively dividing tumor lesions (red arrows, FIG. 20A), where therapeutic delivery is most effective. On the other hand, colonies found in healthy tissue were observed far less frequently and were much smaller in size (FIG. 20A). Bacterial colonies were rarely spotted in healthy tissue and were very small (1, white arrow, FIG. 20B). However, in the metastatic lesions, the colonies appeared significantly larger in area (2, white arrows, FIG. 20B). Within the liver, 87.7% of colonies were found within the metastatic lesions while the other 12.3% were found within healthy liver tissue. Moreover, the size of the colonies within the metastatic lesions was over 118 times greater than the size of colonies in healthy tissue (***, p=2.2×10-26; FIG. 20C). This equates to an 850-fold enrichment of EBV-003 in metastatic breast cancer lesions within the liver versus the immediately adjacent healthy tissue. While we have demonstrated the ability of therapeutic Salmonella to colonize primary tumors greater than 1,000-fold more than any other organ, this is the first demonstration that Salmonella preferentially colonize metastatic tumor lesions as compared to immediately adjacent healthy tissue to a similarly high magnitude. This illustrates the exquisite selectivity of EBV-003 to colonize tumor tissue regardless of whether the tumors are primary or metastatic lesions.

[0393] The EBV-003 strain also intracellularly invaded cancer cells within liver metastases (white arrows, FIG. 21A). However, there was no difference in invasion levels between salicylate induced and uninduced EBV-003 (FIG. 21B). One reason for this could be that most of the metastatic lesions contained a higher fraction of viable tumor tissue and lower amount of necrosis. As a result, EBV-003 bacteria were more likely to be in close proximity to viable tumor cells increasing the likelihood that the bacteria could intracellularly invade the cells regardless of induction status. This is in contrast to primary tumor tissue, where salicylate induction of flhDC increased the intracellular presence of EBV-003 within the quiescent tumor tissue (FIG. 18A). This could be because the bacteria preferentially colonized necrosis and required flhDC dependent motility to swim towards and intracellularly invade the actively dividing cancer cells. Therefore, this indicates that flhDC induction is necessary for intracellular invasion within a primary tumor mass but less so within small, non-necrotic metastatic or primary lesions.

[0394] Although EBV-003 seemed to invade metastatic cancer cells in the presence or absence of flhDC activity, protein delivery was detected at higher frequencies with salicylate induction in vivo. Cytosolic delivery into cells within metastatic tumors was detected histologically (white arrow, FIG. 22A). The frequency of protein delivery into cells within metastases was three-fold higher in induced EBV-003 versus uninduced EBV-003 (**, P<0.01; FIG. 22B). Taken together, these results indicate that induction of flhDC improves protein delivery in both primary and metastatic breast tumors.

[0395] All publications, patents, and patent applications mentioned in this specification are herein incorporated by reference to the same extent as if each individual publication, patent, or patent application was specifically and individually indicated to be incorporated by reference. In the event that the definition of a term incorporated by reference conflicts with a term defined herein, this specification shall control.

1. A bacterial cell comprising:
a) a SseJ deletion or wherein expression of SseJ has been reduced; and
b) a lysis gene or lysis cassette operably linked to an intracellularly induced Salmonella promoter.

2. The cell of claim 1, wherein the bacterial cell is an intratumoral bacteria cell.

3. The cell of claim 1, wherein the bacterial cell is a Clostridium, Escherichia coli Bifidus or Salmonella cell.

4. The cell of claim 1, wherein the bacterial cell is a Salmonella cell.

5. The cell of claim 1, wherein the lysis cassette is Lysin E from phage phiX174, the lysis cassette of phage iEPS5, or the lysis cassette from lambda phage.

6. The cell of claim 1, wherein the intracellularly induced Salmonella promoter is a promoter for one of the genes in Salmonella pathogenicity island 2 type III secretion system (SPI2-T3SS) selected from the group SpiC/SsaB, SseF, SseG, SseI, SseJ, SseKJ, SseK2, SifA, SifB, PipB, PipB2, SopD2, GogB, SseL, SteC, SspH1, SspH2, or SirP.

7. The cell of claim 1, wherein the cell does not comprise endogenous flhDC expression.

8. The cell of claim 1, wherein the cell does not comprise endogenous flhDC, motA, motB, flhE, cheZ, cheY cheB, cheR, cheM, cheW, cheA, fliA, fliY, fliZ, fliB, fliS, fliE, fliF, fliJ, fliL, fliM, fliN, fliO, flip, fliQ, fliR, fliG, fliH, fliI, fliT, fliD, fliC, fljB, ycrG, flgN, flgM, flgA, flgB, flgC, flgD, flgE, flgF, flgG, flgH, flgI, flgJ, flgK and/or flgL expression.

9. The cell claim 1, wherein the cell comprises an exogenous inducible promoter operably linked to an endogenous or exogenous flhDC, motA, motB, flhE, cheZ, cheY cheB, cheR, cheM, cheW, cheA, fliA, fliY, fliZ, fliB, fliS, fliE, fliF, fliJ, fliL, fliM, fliN, fliO, flip, fliQ, fliR, fliG, fliH, fliI, fliT, fliD, fliC, fljB, ycrG, flgN, flgM, flgA, flgB, flgC, flgD, flgE, flgF, flgG, flgH, flgI, flgJ, flgK and/or flgL gene.

10. The cell of claim 9, wherein the exogenous inducible promoter is operably linked to the endogenous flhDC, motA, motB, flhE, cheZ, cheY cheB, cheR, cheM, cheW, cheA, fliA, fliY, fliZ, fliB, fliS, fliE, fliF, fliJ, fliL, fliM, fliN, fliO, flip, fliQ, fliR, fliG, fliH, fliI, fliT, fliD, fliC, fljB, ycrG, flgN, flgM, flgA, flgB, flgC, flgD, flgE, flgF, flgG, flgH, flgI, flgJ, flgK and/or flgL gene.

11. The cell of claim 9, wherein the exogenous inducible promoter is operably linked the exogenous flhDC, motA, motB, flhE, cheZ, cheY cheB, cheR, cheM, cheW, cheA, fliA, fliY, fliZ, fliB, fliS, fliE, fliF, fliJ, fliL, fliM, fliN, fliO, flip, fliQ, fliR, fliG, fliH, fliI, fliT, fliD, fliC, fljB, ycrG, flgN, flgM, flgA, flgB, flgC, flgD, flgE, flgF, flgG, flgH, flgI, flgJ, flgK and/or flgL gene.

12. The cell of claim 9, wherein the exogenous inducible promoter comprises the arabinose inducible promoter PBAD (L-arabinose), LacI (IPTG), salR or nahR (acetyl salicylic acid (ASA)).

13. The cell of claim 1, where the cells comprise a plasmid that expresses a peptide.

14. The cell of claim 13, wherein the peptide is a therapeutic peptide.

15. The cell of claim 13, wherein the peptide is NIPP1 or activated caspase 3.

16. A composition comprising a population of cells of claim 1 and a pharmaceutically acceptable carrier.

17. A method to colonize a tumor and/or tumor associated cells comprising administering a population of the bacterial cells of claim 1 to a subject in need thereof.

18. The method of claim 17, wherein the tumor associated cells are intratumoral immune cells or stromal cells within tumors.

19. A method to treat cancer comprising administering to subject in need thereof an effective amount of a population of the bacterial cells of claim 1 so as to treat said cancer.

20. A method of inhibiting tumor growth/proliferation or reducing the volume/size of a tumor comprising administering to subject in need thereof an effective amount of a population of the bacterial cells of claim 1, so as to suppress tumor growth or reduce the volume of the tumor.

21. A method to treat, reduce formation/number or inhibit spread of metastases comprising administering to subject in need thereof an effective amount of a population of the bacterial cells of claim 1, so as to treat, reduce formation/number or inhibit spread of metastases.

22. The method of claim 17, wherein the tumor, tumor associated cells, cancer, or metastases are a lung, liver, kidney, breast, prostate, pancreatic, skin, colon, head and neck, ovarian and/or gastroenterological tumor, tumor associated cells, cancer or metastases.

23. The method of claim 17, wherein the bacterial cells deliver a therapeutic peptide, such as NIPP1 or activated caspase 3, to said tumor, tumor associated cells, cancer or metastases.

24. The method of claim 17, wherein endogenous expression of flhDC, motA, motB, flhE, cheZ, cheY cheB, cheR, cheM, cheW, cheA, fliA, fliY, fliZ, fliB, fliS, fliE, fliF, fliJ, fliL, fliM, fliN, fliO, flip, fliQ, fliR, fliG, fliH, fliI, fliT, fliD, fliC, fljB, ycrG, flgN, flgM, flgA, flgB, flgC, flgD, flgE, flgF, flgG, flgH, flgL, flgJ, flgK and/or flgL is under control of an exogenous inducible promoter.

25. The method of claim 17, wherein expression of flhDC, motA, motB, flhE, cheZ, cheY cheB, cheR, cheM, cheW, cheA, fliA, fliY, fliZ, fliB, fliS, fliE, fliF, fliJ, fliL, fliM, fliN, fliO, flip, fliQ, fliR, fliG, fliH, fliI, fliT, fliD, fliC, fljB, ycrG, flgN, flgM, flgA, flgB, flgC, flgD, flgE, flgF, flgG, flgH, flgL, flgJ, flgK and/or flgL is under the control of an inducible promoter, wherein the bacterial cells comprise an exogenous inducible promoter operably linked an exogenous flhDC, motA, motB, flhE, cheZ, cheY cheB, cheR, cheM, cheW, cheA, fliA, fliY, fliZ, fliB, fliS, fliE, fliF, fliJ, fliL, fliM, fliN, fliO, flip, fliQ, fliR, fliG, fliH, fliI, fliT, fliD, fliC, fljB, ycrG, flgN, flgM, flgA, flgB, flgC, flgD, flgE, flgF, flgG, flgH, flgL, flgJ, flgK and/or flgL gene.

26. The method of claim 24, wherein the expression of flhDC, motA, motB, flhE, cheZ, cheY cheB, cheR, cheM, cheW, cheA, fliA, fliY, fliZ, fliB, fliS, fliE, fliF, fliJ, fliL, fliM, fliN, fliO, flip, fliQ, fliR, fliG, fliH, fliI, fliT, fliD, fliC, fljB, ycrG, flgN, flgM, flgA, flgB, flgC, flgD, flgE, flgF, flgG, flgH, flgL, flgJ, flgK and/or flgL is induced after said tumor, tumor associated cells, cancer or metastases have been colonized by said bacteria.

The application's sequence listing, which the Patent Office published only in electronic form, follows.

SEQUENCE LISTING (232 sequences)

SEQ ID NO: 1 - DNA, 923 bp, Salmonella Typhimurium
atgcatacatccgagttgctaaaacacatttatgacatcaatttgtcatatttactccttgcacagcgtttgatcgtccaggacaaagcatctgcgatgttccgcctcggtatcaacgaagagatggcaaacacactgggcgcgttgaccctgccgcagatggtcaaactggcggagacgaaccagttagtttgtcatttccggtttgacgatcatcagacgatcacccgtttgactcaggattcgcgcgtcgatgacttacagcagattcacacaggtatcatgctttcaacgcgtctgctcaatgaagtggacgatacggcgcgtaagaaaagggcatgataatgagtgaaaaaagcattgttcaggaagctcgcgatatccagttggcgatggagttgattaatcttggcgctcgtctacaaatgctggaaagcgaaacacagctcagccgtggtcgcctcatcaggctgtacaaagaattacgcggtagcccgccgcctaaagggatgctgccattttcgacagactggtttatgacctgggagcaaaatattcatgcctccatgttctgcaacgcctggcaatttttactgaagaccggcttatgcagcggtgtggatgcggtgattaaagcttatcggctttatcttgagcagtgtccgcaaccgcctgaagggccgttgttggcgctgactcgcgcatggacgctggtgcgttttgttgaaagtgggttgcttgaattgtcgagctgtaactgctgcggtgggaactttattacccatgcgcatcagcccgtaggcagctttgcgtgtagtttatgccagccgccatcccgcgcagtaaaaagacgtaaactttcccgagatgctgccgatattattccacaactgctggatgaacagatcgaacaggctgtttaa

SEQ ID NO: 2 - protein, 113 aa, Salmonella Typhimurium
MHTSELLKHIYDINLSYLLLAQRLIVQDKASAMFRLGINEEMANTLGALTLPQMVKLAETNQLVCHFRFDDHQTITRLTQDSRVDDLQQIHTGIMLSTRLLNEVDDTARKKRA

SEQ ID NO: 3 - protein, 192 aa, Salmonella Typhimurium
MSEKSIVQEARDIQLAMELINLGARLQMLESETQLSRGRLIRLYKELRGSPPPKGMLPFSTDWFMTWEQNIHASMFCNAWQFLLKTGLCSGVDAVIKAYRLYLEQCPQPPEGPLLALTRAWTLVRFVESGLLELSSCNCCGGNFITHAHQPVGSFACSLCQPPSRAVKRRKLSRDAADIIPQLLDEQIEQAV

SEQ ID NO: 4 - protein, 295 aa, Salmonella Typhimurium
MLILLGYLVVIGTVFGGYVMTGGHLGALYQPAELVIIGGAGIGAFIVGNNGKAIKGTMKAIPLLFRRSKYTKSMYMDLLALLYRLMAKSRQQGMFSLERDIENPKESEIFASYPRILADAVMLDFIVDYLRLIISGNMNTFEIEALMDEEIETHESEAEVPANSLAMVGDSLPAFGIVAAVMGVVHALASADRPAAELGALIAHAMVGTFLGILLAYGFISPLATVLRQKSAETTKMMQCVKITLLSNLNGYAPPIAVEFGRKTLYSSERPSFIELEEHVRAVRNPNQQQTTEEA

SEQ ID NO: 5 - protein, 309 aa, Salmonella Typhimurium
MKNQAHPIVVVKRRRHKPHGGGAHGSWKIAYADFMTAMMAFFLVMWLISISSPKELIQIAEYFRTPLATAVTGGNRIANSESPIPGGGDDYTQQQGEVEKQPNIDELKKRMEQSRLNKLRGDLDQLIESDPKLRALRPHLKIDLVQEGLRIQIIDSQNRPMFKTGSAEVEPYMRDILRAIAPVLNGIPNRISLAGHTDDFPYANGEKGYSNWELSADRANASRRELVAGGLDNGKVLRVVGMAATMRLSDRGPDDAINRRISLLVLNKQAEQAILHENAESQNEBVSVLQQPAAAPPASVPTSPKAEPR

SEQ ID NO: 6 - protein, 130 aa, Salmonella Typhimurium
MRKWLALLLFPLTVQAAGEGAWQDSGMGVTLNYRGVSASSSPLSARQPVSGVMTLVAWRYELNGPTPAGLRVRLCSQSRCVELDGQSGTTHGFAHVPAVEPLRFVWEVPGGGRLIPALKVRSNQVIVNYR

SEQ ID NO: 7 - protein, 214 aa, Salmonella Typhimurium
MMQPSIKPADEGSAGDIIARIGSLTRMLRDSLRELGLDQAIAEAAEAIPDARDRLDYVVQMTAQAAERALNSVEASQPHQDAMEKEAKALTQRWDEWFDNPIELSDARELVTDTRQFLRDVPGHTSFTNAQLLDIMMAQDFQDLTGQVIKRMMDVIQEIERQLLMVLLENIPEQSARPKRENESLLNGPQVDTSKAGVVASQDQVDDLLDSLGF

SEQ ID NO: 8 - protein, 129 aa, Salmonella Typhimurium
MADKELKFLVVDDFSTMRRIVRNLLKELGFNNVEEAEDGVDALNKLQAGGFGFIISDWNMPNMDGLELLKTIRADSAMSALPVLMVTAEAKKENIIAAAQAGASGYVVKPFTAATLEEKLNKIFEKLGM

SEQ ID NO: 9 - protein, 349 aa, Salmonella Typhimurium
MSKIRVLSVDDSALMRQIMTEIINSHSDMEMVATAPDPLVARDLIKKFNPDVLTLDVEMPRMDGLDFLEKLMRLRPMPVVMVSSLTGKGSEVTLRALELGAIDFVTKPQLGIREGMLAYSEMIAEKVRTAARARIAAHKPMAAPTTLKAGPLLSSEKLIAIGASTGGTEAIRHVLQPLPLSSPAVIITQHMPPGFTRSFAERLNKLCQISVKEAEDGERVLPGHAYIAPGDKHMELARSGANYQIKIHDGPPVNRHRPSVDVLFHSVAKHAGRNAVGVILTGMGNDGAAGMLAMYQAGAWTIAQNEASCVVFGMPREAINMGGVSEVVDLSQVSQQMLAKISAGQAIRI

SEQ ID NO: 10 - protein, 288 aa, Salmonella Typhimurium
MTSSLPSGQTSVLLQMTQRLALSDAHFRRICQLIYQRAGIVLADHKRDMVYNRLVRRLRALGLDDFGRYLSMLEANQNSAEWQAFINALTTNLTAFFREAHHFPILAEHARRRHGEYRVWSAAASTGEEPYSIAITLADALGMAPGRWKVFASDIDTEVLEKARSGIYRLSELKTLSPQQLQRYFMRGTGPHEGLVRVRQELANYVEFSSVNLLEKQYNVPGPFDAIFCRNVMIYFDKTTQEDILRRFVPLLKPDGLLFAGHSENFSNLVREFSLRGQTVYALSKDKA

SEQ ID NO: 11 - protein, 553 aa, Salmonella Typhimurium
MFNRIRVVTMLMMVLGVFALLQLVSGGLLFSSLQHNQQGFVISNELRQQQSELTSTWDLMLQTRINLSRSAARMMMDASNQQSSAKTDLLQNAKTTLAQAAAHYANFKNMTPLPAMAEASANVDEKYQRYQAALAELIQFLDNGNMDAYFAQPTQGMQNALGEALGNYARVSENLYRQTFDQSAHDYRFAQWQLGVLAVVLVLILMVVWFGIRHALLNPLARVITHIREIASGDLTKTLTVSGRNEIGELAGTVEHMQRSLIDTVTQVREGSDAIYSGTSEIAAGNTDLSSRTEQQASALEETAASMEQLTATVKQNADNARQASQLAQSASETARHGGKVVDGVVNTMHEIADSSKKIADIISVIDGIAFQTNILALNAAVEAARAGEQGRGFAVVAGEVRNLASRSAQAAKEIKALIEDSVSRVDTGSVLVESAGETMTDIVNAVTRVTDIMGEIASASDEQSRGIDQVALAVSEMDRVTQQNASLVQESAAAAAALEEQASRLTQAVSAFRLASRPLAVNKPEMRLSVNAQSGNTPQSLAARDDANWETF

SEQ ID NO: 12 - protein, 167 aa, Salmonella Typhimurium
MTGMSNVSKLAGEPSGQEFLVFTLGNEEYGIDILKVQEIRGYDQVTRIANTPAFIKGVTNLRGVIVPIVDLRVKFCEGDVEYDDNTVVIVLNLGQRVVGIVVDGVSDVLSLTAEQIRPAPEFAVTLSTEYLTGLGALGERMLILVNIEKLLNSEEMALLDIAASHVA

SEQ ID NO: 13 - protein, 671 aa, Salmonella Typhimurium
MSMDISDFYQTFFDEADELLADMEQHLLDLVPESPDAEQLNAIFRAAHSIKGGAGTFGFTILQETTHLMENLLDEARRGEMQLNTDIINLFLETKDIMQEQLDAYKNSEEPDAASFEYICNALRQLALEAKGETTPAVVETAALSAAIQEESVAETESPRDESKLRIVLSRLKANEVDLLEEELGNLATLTDVVKGADSLSATLDGSVAEDDIVAVLCFVIEADQIAFEKVVAAPVEKAQEKTEVAPVAPPAVVAPAAKSAAHEHHAGREKPARERESTSIRVAVEKVDQLINLVGELVITQSMLAQRSNELDPVNHGDLITSMGQLQRNARDLQESVMSIRMMPMEYVFSRFPRLVRDLAGKLGKQVELTLVGSSTELDKSLIERIIDPLTHLVRNSLDHGIEMPEKRLEAGKNVVGNLILSAEHQGGNICIEVTDDGAGLNRERILAKAMSQGMAVNENMTDDEVGMLIFAPGFSTAEQVTDVSGRGVGMDVVKRNIQEMGGHVEIQSKQGSGTTIRILLPLTLAILDGMSVRVAGEVFILPLNAVMESLQPREEDLHPLAGGERVLEVRGEYLPLVELWKVFDVDGAKTEATQGIVVILQSAGRRYALLVDQLIGQHQVVVKNLESNYRKVPGISAATILGDGSVALIVDVSALQGLNREQRMAITAA

SEQ ID NO: 14 - protein, 239 aa, Salmonella Typhimurium
MNSLYTAEGVMDKHSLWQRYVPLVRHEALRLQVRLPASVELDDLLQAGGIGLLNAVDRYDALQGTAFTTYAVQRIRGAMLDELRSRDWVPRSVRRNAREVAQAMGQLEQELGRNATETEVAERLGIPVAEYRQMLLDTNNSQLFSYDEWREEHGDSIELVTEEHQQENPLHQLLEGDLRQRVMDAIESLPEREQLVLTLYYQEELNLKEIGAVLEVGESRVSQLHSQAIKRLRTKLGKL

SEQ ID NO: 15 - protein, 263 aa, Salmonella Typhimurium
MKLALLGRQALMGVMAVALVAGMSAKSFADEGLLNKVKERGTLLVGLEGTYPPFSFQGEDGKLTGFEVDFAEALAKHLGVKASLKPTKWDGMLASLDAKRIDVVINQVTISDVRKKKYDFSTPYTVSGIQALVKKGNEGTIKTAADLQGKKVGVGLGTNYEEWLRQHVQGVDIRTYDDDPTKYQDLRVGRIDAILVDRLAALDLVKKTKGTLAVTGDAFSRQESGVALRKGNEDLLKAVDNAIAEMQKDGTLKALSEKWFGAD

SEQ ID NO: 16 - protein, 183 aa, Salmonella Typhimurium
MTVQQPKRRPLSRYLKDFKHSQTHCAHCHKLLDRITLVRRGKIVNKIAISQLDMLLDDAAWQREQKEWVALCRFCGDLHCKKQSDFFDIIGFKQYLFEQTEMSHGTVREYVVRLRRLGNYLSEQNISHDLLQDGFLDESLAPWLPETSTNNYRIALRKYQQYKAHQQIAPRQKSPFTASSDIY

SEQ ID NO: 17 - protein, 506 aa, Salmonella Typhimurium
MAQVINTNSLSLLTQNNLNKSQSALGTAIERLSSGLRINSAKDDAAGQAIANRFTANIKGLTQASRNANDGISIAQTTEGALNEINNNLQRVRELAVQSANSTNSQSDLDSIQAEITQRLNEIDRVSGQTQFNGVKVLAQDNTLTIQVGANDGETIDIDLKQINSQTLGLDSLNVQKAYDVKDTAVTTKAYANNGTTLDVSGLDDAAIKAATGGTNGTASVTGGAVKFDADNNKYFVTIGGFTGADAAKNGDYEVNVATDGTVTLAAGATKTTMPAGATTKTEVQELKDTPAVVSADAKNALIAGGVDATDANGAELVKMSYTDKNGKTIEGGYALKAGDKYYAADYDEATGAIKAKTTSYTAADGTTKTAANQLGGVDGKTEVVTIDGKTYNASKAAGHDFKAQPELAEAAAKTTENPLQKIDAALAQVDALRSDLGAVQNRFNSAITNLGNTVNNLSEARSRIEDSDYATEVSNMSRAQILQQAGTSVLAQANQVPQNVLSLLR

SEQ ID NO: 18 - protein, 135 aa, Salmonella Typhimurium
MYTASGIKAYAQVSVESAVMSASPHQLIEMLFDGANSALVRARLFLEQGDVVAKGEALSKAINIIDNGLKAGLDQEKGGEIATNLSELYDYMIRRLLQANLRNDAQAIEEVEGLLSNIAEAWKQISPKASFQESR

SEQ ID NO: 19 - protein, 104 aa, Salmonella Typhimurium
MAAIQGIEGVISQLQATAMAARGQDTHSQSTVSFAGQLHAALDRISDRQAAARVQAEKFTLGEPGIALNDVMADMQKASVSMQMGIQVRNKLVAAYQEVMSMQV

SEQ ID NO: 20 - protein, 560 aa, Salmonella Typhimurium
MSATASTATQPKPLEWLNRLRANPRIPLIVAGSAAVAIVVAMVLWAKTPDYRTLFSNLSDQDGGAIVAQLTQMNIPYRFANGSGAIEVPADKVHELRLRLAQQGLPKGGAVGFELLDQEKFGISQFSEQVNYQRALEGELARTIETLGPVKSARVHLAMPKPSLFVREQKSPSASVTVTLEPGRALDEGQISAVVHLVSSAVAGLPPGNVTLVDQSGHLLTQSNTSGRDLNDAQLKFANDVESRIQRRIEAILSPIVGNGNVHAQVTAQLDFANKEQTEEHYSPNGDASKATLRSRQLNISEQVGAGYPGGVPGALSNQPAPPNEAPIATPPTNQQNAQNTPQTSTSTNSNSAGPRSTQRNETSNYEVDRTIRHTKMNVGDIERLSVAVVVNYKTLADGKPLPLTADQMKQIEDLTREAMGFSDKRGDTLNVVNSPFSAVDNTGGELPFWQQQSFIDQLLAAGRWLLVLVVAWILWRKAVRPQLTRRVEEAKAAQEQAQVRQETEEAVEVRLSKDEQLQQRRANQRLGAEVMSQRIREMSDNDPRVVALVIRQWMSNDHE

SEQ ID NO: 21 - protein, 147 aa, Salmonella Typhimurium
MAQHGALETLKDLAEKEVDDAARLLGEMRRGCQQAEEQLKMLIDYQNEYRSNLNTDMGNGIASNRWINYQQFIQTLEKAIEQHRLQLTQWTQKVDLALKSWREKKQRLQAWQTLQDRQTAAALLAENRMDQKKMDEFAQRAAMRKPE

SEQ ID NO: 22 - protein, 155 aa, Salmonella Typhimurium
MTDSAINKKSKRSIWIPLLVLITLAACATAGYSYWRMQQQPTTNAKAEPAPPPAPVFFALDTFTVNLGDADRVLYIGVTLRLKDEATRARLNEYLPEVRSRLLLLFSRQNAAELSTEAGKQKLIAAIKETLAAPLVAGQPKQVVTDVLYTAFILR

SEQ ID NO: 23 - protein, 334 aa, Salmonella Typhimurium
MGDSILSQAEIDALLNGDSDTKDEPTPGIASDSDIRPYDPNTQRRVVRERLQALEIINERFARQFRMGLFNLLRRSPDITVGAIRIQPYHEFARNLPVPTNLNLIHLKPLRGTGLVVFSPSLVFIAVDNLFGGDGRFPTKVEGREFTHTEQRVINRMLKLALEGYSDAWKAINPLEVEYVRSEMQVKFTNITTSPNDIVVNTPFHVEIGNLTGEFNICLPFSMIEPLRELLVNPPLENSRHEDQNWRDNLVRQVQHSELELVANFADIPLRLSQILKLKPGDVLPIEKPDRIIAHVDGVPVLTSQYGTVNGQYALRVEHLINPILNSLNEEQPK

SEQ ID NO: 24 - protein, 137 aa, Salmonella Typhimurium
MSDMNNPSDENTGALDDLWADALNEQKATTTKSAADAVFQQLGGGDVSGAMQDIDLIMDIPVKLTVELGRTRMTIKELLRLTQGSVVALDGLAGEPLDILINGYLIAQGEVVVVADKYGVRITDIITPSERMRRLSR

SEQ ID NO: 25 - protein, 125 aa, Salmonella Typhimurium
MMKTEATVSQPTAPAGSPLMQVSGALIGIIALILAAAWVIKRMGFAPKGNSVRGLKVSASASLGPRERVVIVEVENARLVLGVTASQINLLHTLPPAENDTEAPVAPPADFQNMMKSLLKRSGRS

SEQ ID NO: 26 - protein, 245 aa, Salmonella Typhimurium
MRRLLFLSLAGLWLFSPAAAAQLPGLISQPLAGGGQSWSLSVQTLVFITSLTFLPAILLMMTSFTRIIIVFGLLRNALGTPSAPPNQVLLGLALFLTFFIMSPVIDKIYVDAYQPFSEQKISMQEALDKGAQPLRAFMLRQTREADLALFARLANSGPLQGPEAVPMRILLPAYVTSELKTAFQIGFTIFIPFLIIDLVIASVLMALGMMMVPPATIALPFKLMLFVLVDGWQLLMGSLAQSFYS

SEQ ID NO: 27 - protein, 89 aa, Salmonella Typhimurium
MTPESVMMMGTEAMKVALALAAPLLLVALITGLIISILQAATQINEMTLSFIPKIVAVFIAIIVAGPWMLNLLLDYVRTLFSNLPYIIG

SEQ ID NO: 28 - protein, 264 aa, Salmonella Typhimurium
MIQVTSEQWLYWLHLYFWPLLRVLALISTAPILSERAIPKRVKLGLGIMITLVIAPSLPANDTPLFSIAALWLAMQQILIGIALGFTMQFAFAAVRTAGEFIGLQMGLSFATFVDPGSHLNMPVLARIMDMLAMLLFLTFNGHLWLISLLVDTFHTLPIGSNPVNSNAFMALARAGGLIFLNGLMLALPVITLLLTLNLALGLLNRMAPQLSIFVIGFPLTLTVGIMLMAALMPLIAPFCEHLFSEIFNLLADIVSEMPINNNP

SEQ ID NO: 29 - protein, 331 aa, Salmonella Typhimurium
MSNLSGTDKSVILLMTIGEDRAAEVFKHLSTREVQALSTAMANVRQISNKQLTDVLSEFEQEAEQFAALNINANEYLRSVLVKALGEERASSLLEDILETRDTTSGIETLNFMEPQSAADLIRDEHPQIIATILVHLKRSQAADILALFDERLRHDVMLRIATFGGVQPAALAELTEVLNGLLDGQNLKRSKMGGVRTAAEIINLMKTQQEEAVITAVREFDGELAQKIIDEMFLFENLVDVDDRSIQRLLQEVDSESLLIALKGAEPPLREKFLRNMSQRAADILRDDLANRGPVRLSQVENEQKAILLIVRRLAETGEMVIGSGEDTYV

SEQ ID NO: 30 - protein, 235 aa, Salmonella Typhimurium
MSNELPWQVWTPDDLAPPPETFVPVEADNVTLTEDTPEPELTAEQQLEQELAQLKIQAHEQGYNAGLAEGRQKGHAQGYQEGLAQGLEQGQAQAQTQQAPIHARMQQLVSEFQNTLDALDSVIASRLMQMALEAARQVIGQTPAVDNSALIKQIQQLLQQEPLFSGKPQLRVHPDDLQRVEEMLGATLSLHGWRLRGDPTLHHGGCKVSADEGDLDASVATRWQELCRLAAPGVL

SEQ ID NO: 31 - protein, 456 aa, Salmonella Typhimurium
MTTRLTRWLTALDNFEAKMALLPAVRRYGRLTRATGLVLEATGLQLPLGATCIIERQDGPETKEVESEVVGFNGQRLFLMPLEEVEGILPGARVYARNGHGDGLQSGKQLPLGPALLGRVLDGGGKPLDGLPAPDTLETGALITPPFNPLQRTPIEHVLDTGVRAINALLTVGRGQRMGLFAGSGVGKSVLLGMMARYTRADVIVVGLIGERGREVKDFIENILGPDGRARSVVIAAPADVSPLLRMQGAAYATRIAEDFRDRGQHVLLIMDSLTRYAMAQREIALAIGEPPATKGYPPSVFAKLPALVERAGNGIHGGGSITAFYTVLTEGDDQQDPIADSARAILDGHIVLSRRLAEAGHYPAIDIEASISRAMTALITEQHYARVRLFKQLLSSFQRNRDLVSVGAYAKGSDPMLDKAITLWPQLEAFLQQGIFERADWEDSLQALDLIFPTV

SEQ ID NO: 32 - protein, 122 aa, Salmonella Typhimurium
MTSTVEFINRWQRIALLSQSLLELAQRGEWDLLLQQEVSYLQSIETVMEKQTPPGITRSIQDMVAGYIKQTLDNEQLLKGLLQQRLDELSSLIGQSTRQKSLNNAYGRLSGMLLVPDAPGAS

SEQ ID NO: 33 - protein, 467 aa, Salmonella Typhimurium
MASISSLGVGSNLPLDQLLTDLTKNEKGRLTPITKQQSANSAKLTAYGTLKSALEKFQTANTALNKADLFKSTVASSTTEDLKVSTTAGAAAGTYKINVTQLAAAQSLATKTTFATTKEQLGDTSVTSRTIKIEQPGRKEPLEIKLDKGDTSMEAIRDAINDADSGIAASIVKVKENEFQLVLTANSGTDNTMKITVEGDTKLNDLLAYDSTTNTGNMQELVKAENAKLNVNGIDIERQSNTVTDAPQGITLTLTKKVTDATVTVTKDDTKAKEAIKSWVDAYNSLVDTFSSLTKYTAVEPGEEASDKNGALLGDSVVRTIQTGIRAQFANSGSNSAFKTMAEIGITQDGTSGKLKIDDDKLTKVLKDNTAAARELLVGDGKETGITTKIATEVKSYLADDGIIDNAQDNVNATLKSLTKQYLSVSNSIDETVARYKAQFTQLDTMMSKLNNTSSYLTQQFTAMNKS

SEQ ID NO: 34 - protein, 495 aa, Salmonella Typhimurium [sequence omitted]

SEQ ID NO: 35 - protein, 506 aa, Salmonella Typhimurium; identical to SEQ ID NO: 17

SEQ ID NO: 36 - protein, 140 aa, Salmonella Typhimurium
MTRLSEILDQMTTVLNDLKTVMDAEQQQLSVGQINGSQLQRITEEKSSLLATLDYLEQQRRLEQNAQRSANDDIAERWQAITEKTQHLRDLNQHNGWLLEGQIERNQQALEVLKPHQEPTLYGADGQTSVSHRGGKKISI

SEQ ID NO: 37 - protein, 97 aa, Salmonella Typhimurium
MSIDRTSPLKPVSTVQTRETSDTPVQKTRQEKTSAATSASVTLSDAQAKLMQPGVSDINMERVEALKTAIRNGELKMDTGKIADSLIREAQSYLQSK

SEQ ID NO: 38 - protein, 219 aa, Salmonella Typhimurium
MQTLKRGFAVAALLFSPLTMAQDINAQLTTWFSQRLAGFSDEVVVTLRSSPNLLPSCEQPAFSMTGSAKLWGNVNVVARCANEKRYLQVNVQATGNYVAVAAPIARGGKLTPANVTLKRGRLDQLPPRTVLDIRQIQDAVSLRDLAPGQPVQLTMIRQAWRVKAGQRVQVIANGEGFSVNAEGQAMNNAAVAQNARVRMTSGQIVSGTVDSDGNILINL

SEQ ID NO: 39 - protein, 138 aa, Salmonella Typhimurium
MLDRLDAALRFQQEALNLRAQRQEILAANIANADTPGYQARDIDFASELKKVMVRGREETGGVALTLTSSHHIPAQAVSSPAVDLLYRVPDQPSLDGNTVDMDRERTQFADNSLKYQMGLTVLGSQLKGMMNVLQGGN

SEQ ID NO: 40 - protein, 134 aa, Salmonella Typhimurium
MALLNIFDIAGSALAAQSKRLNVAASNLANADSVTGPDGQPYRAKQVVFQVDAAPGQATGGVKVASVIESQAPEKLVYEPGNPLADANGYVKMPNVDVVGEMVNTMSASRSYQANIEVLNTVKSMMLKTLTLGQ

SEQ ID NO: 41 - protein, 232 aa, Salmonella Typhimurium
MSIAVNMNDPTNTGVKTTTGSGSMTGSNAADLQSSFLTLLVAQLKNQDPTNPLQNNELTTQLAQISTVSGIEKLNTTLGAISGQIDNSQSLQATTLIGHGVMVPGTTILAGKGAEEGAVTSTTPFGVELQQPADKVTATITDKDGRVVRTLEIGELRAGVHTFTWDGKQTDGTTVPNGSYNIAITASNGGTQLVAQPLQFALVQGVTKGSNGNLLDLGTYGTTTLDEVRQII

SEQ ID NO: 42 - protein, 403 aa, Salmonella Typhimurium
MSFSQAVSGLNAAATNLDVIGNNIANSATYGFKSGTASFADMFAGSKVGLGVKVAGITQDFTDGTTTNTGRGLDVAISQNGFFRLVDSNGSVFYSRNGQFKLDENRNLVNMQGMQLTGYPATGTPPTIQQGANPAPITIPNTLMAAKSTTTASMQINLNSTDPVPSKTPFSVSDADSYNKKGTVTVYDSQGNAHDMNVYFVKTKDNEWAVYTHDSSDPAATAPTTASTTLKFNENGILESGGTVNITTGTINGATAATFSLSFLNSMQQNTGANNIVATNQNGYKPGDLVSYQINNDGTVVGNYSNEQEQVLGQIVLANFANNEGLASQGDNVWAATQASGVALLGTAGSGNFGKLTNGALEASNVDLSKELVNMIVAQRNYQSNAQTIKTQDQILNTLVNLR

SEQ ID NO: 43 - protein, 251 aa, Salmonella Typhimurium
MDHAIYTAMGAASQTLNQQAVTASNLANASTPGFRAQLNALRAVPVDGLSLATRTLVTASTPGADMTPGQLDYTSRPLDVALQQDGWLVVQAADGAEGYTRNGNIQVGPTGQLTIQGHPVIGEGGPITVPEGSEITIAADGTISALNPGDPPNTVAPVGRLKLVKAEGNEVQRSDDGLFRLTAEAQAERGAVLAADPSIRIMSGVLEGSNVKPVEAMTDMIANARRFEMQMKVITSVDENEGRANQLLSMS

SEQ ID NO: 44 - protein, 260 aa, Salmonella Typhimurium
MISSLWIAKTGLDAQQTNMDVIANNLANVSTNGFKRQRAVFEDLLYQTIRQPGAQSSEQTTLPSGLQIGTGVRPVATERLHSQGNLSQTNNSKDVAIKGQGFFQVMLPDGTSAYTRDGSFQVDQNGQLVTAGGFQVQPAITIPANALSITIGRDGVVSVTQQGQAAPVQVGQLNLTTFMNDTGLESIGENLYIETQSSGAPNESTPGLNGAGLLYQGYVETSNVNVAEELVNMIQVQRAYEINSKAVSTTDQMLQKLTQL

SEQ ID NO: 45 - protein, 232 aa, Salmonella Typhimurium
MQKYALHAYPVMALMVATLTGCAWIPAKPLVQGATTAQPIPGPVPVANGSIFQSAQPINYGYQPLFEDRRPRNIGDTLTIVLQENVSASKSSSANASRDGKTSFGFDTVPRYLQGLFGNSRADMEASGGNSFNGKGGANASNTFSGTLTVTVDQVLANGNLHVVGEKQIAINQGTEFIRFSGVVNPRTISGSNSVPSTQVADARIEYVGNGYINEAQNMGWLQRFFLNLSPM

SEQ ID NO: 46 - protein, 365 aa, Salmonella Typhimurium
MFKALAGIVLALVATLAHAERIRDLTSVQGVRENSLIGYGLVVGLDGTGDQTTQTPFTTQTLNNMLSQLGITVPTGTNMQLKNVAAVMVTASYPPFARQGQTIDVVVSSMGNAKSLRGGTLLMTPLKGVDSQVYALAQGNILVGGAGASAGGSSVQVNQLNGGRITNGAIIERELPTQFGAGNTINLQLNDEDFTMAQQITDAINRARGYGSATALDARTVQVRVPSGNSSQVRFLADIQNMEVNVTPQDAKVVINSRTGSVVMNREVTLDSCAVAQGNLSVTVNRQLNVNQPNTPFGGGQTVVTPQTQIDLRQSGGSLQSVRSSANLNSVVRALNALGATPMDLMSILQSMQSAGCLRAKLEII

SEQ ID NO: 47 - protein, 316 aa, Salmonella Typhimurium
MIGDGKLLASAAWDAQSLNELKAKAGQDPAANIRPVARQVEGMFVQMMLKSMREALPKDGLFSSDQTRLYTSMYDQQIAQQMTAGKGLGLADMMVKQMTSGQTMPADDAPQVPLKFSLETVNSYQNQALTQLVRKAIPKTPDSSDAPLSGDSKDFLARLSLPARLASEQSGVPHHLILAQAALESGWGQRQILRENGEPSYNVFGVKATASWKGPVTEITTTEYENGEAKKVKAKFRVYSSYLEALSDYVALLTRNPRYAAVTTAATAEQGAVALQNAGYATDPNYARKLTSMIQQLKAMSEKVSKTYSANLDNLF

SEQ ID NO: 48 - protein, 553 aa, Salmonella Typhimurium
MSSLINHAMSGLNAAQAALNTVSNNINNYNVAGYTRQTTILAQANSTLGAGGWIGNGVYVSGVQREYDAFITNQLRGAQNQSSGLTTRYEQMSKIDNLLADKSSSLSGSLQSFFTSLQTLVSNAEDPAARQALIGKAEGLVNQFKTTDQYLRDQDKQVNIAIGSSVAQINNYAKQIANLNDQISRMTGVGAGASPNDLLDQRDQLVSELNKIVGVEVSVQDGGTYNLTMANGYTLVQGSTARQLAAVPSSADPTRTTVAYVDEAAGNIEIPEKLLNTGSLGGLLTFRSQDLDQTRNTLGQLALAFADAFNAQHTKGYDADGNKGKDFFSIGSPVVYSNSNNADKTVSLTAKVVDSTKVQATDYKIVFDGTDWQVTRTADNTTFTATKDADGKLEIDGLKVTVGTGAQKNDSFLLKPVSNAIVDMNVKVTNEAEIAMASESKLDPDVDTGDSDNRNGQALLDLQNSNVVGGNKTFNDAYATLVSDVGNKTSTLKTSSTTQANVVKQLYKQQQSVSGVNLDEEYGNLQRYQQYYLANAQVLQTANALFDALLNIR

SEQ ID NO: 49 - protein, 317 aa, Salmonella Typhimurium
MRISTQMMYEQNMSGITNSQAEWMKLGEQMSTGKRVTNPSDDPIAASQAVVLSQAQAQNSQYALARTFATQKVSLEESVLSQVTTAIQTAQEKIVYAGNGTLSDDDRASLATDLQGIRDQLMNLANSTDGNGRYIFAGYKTEAAPFDQATGGYHGGEKSVTQQVDSARTMVIGHTGAQIFNSITSNAVPEPDGSDSEKNLFVMLDTAIAALKTPVEGNNVEKEKAAAAIDKTNRGLKNSLNNVLTVRAELGTQLSELSTLDSLGSDRALGQKLQMSNLVDVDWNSVISSYVMQQAALQASYKTFTDMQGMSLFQLNR

SEQ ID NO: 50 - protein, 133 aa, Salmonella
MSEEGFMLAVLKGIPLIQDIRAEGNSRSWIMTIDGHPARGEIFSEAFSISLFLNDLESLPKPCLAYVTLLLAAHPDVHDYAIQLTADGGWLNGYYTTSSSSELIAIEIEKHLALTCILKNVIRNHHKLYSGGV

SEQ ID NO: 51 - protein, 260 aa, Salmonella
MKIHIPSAASNIVDGNSPPSDIQAKEVSFPPPEIPAPGTPAAPVLLTPEQIRQQRDYAIHFMQYTIRALGATVVFGLSVAAAVISGGAGLPIAILAGAALVIAIGDACCAYHNYQSICQQKEPLQTASDSVALVVSALALKCGASLNCANTLANCLSLLIRSGIAISMLVLPLQFPLPAAENIAASLDMGSVITSVSLTAIGAVLDYCLARPSGDDQENSVDELHADPSVLLAEQMAALCQSATTPALMDSSDHTSRGEP

SEQ ID NO: 52 - protein, 229 aa, Salmonella
MKPVSPNAQVGGQRPVNAPEESPPCPSLPHPETNMESGRIGPQQGKERVLAGLAKRVIECFPKEIFSWQTVILGGQILCCSAGIALTVLSGGGAPLVALAGIGLAIAIADVACLIYHHKHHLPMAHDSIGNAVFYIANCFANQRKSMAIAKAVSLGGRLALTATVMTHSYWSGSLGLQPHLLERLNDITYGLMSFTRFGMDGMAMTGMQVSSPLYRLLAQVTPEQRAPE

SEQ ID NO: 53 - protein, 322 aa, Salmonella
MPFHIGSGCLPAIISNRRIYRIAWSDTPPEMSSWEKMKEFFCSTHQAEALECIWTICHPPAGTTREDVVSRFELLRTLAYDGWEENIHSGLHGENYFCILDEDSQEILSVTLDDVGNYTVNCQGYSETHHLTMATEPGVERTDITYNLTSDIDAAAYLEELKQNPIINNKIMNPVGQCESLMTPVSNFMNEKGFDNIRYRGIFIWDKPTEEIPTNHFAVVGNKEGKDYVFDVSAHQFENRGMSNLNGPLILSADEWVCKYRMATRRKLIYYTDFSNSSIAANAYDALPRELESESMAGKVFVTSPRWFNTFKKQKYSLIGKM

SEQ ID NO: 54 - protein, 408 aa, Salmonella
MPLSVGQGYFTSSISSEKFNAIKESARLPELSLWEKIKAYFFTTHHAEALECIFNLYHHQELNLTPVQVRGAYIKLRALASQGCKEQFIIESQEHADKLIIKDDNGENILSIEVECHPEAFGLAKEINKSHPKPKNISLGDITRLVFFGDSLSDSLGRMFEKTHHILPSYGQYFGGRFTNGFTWTEFLSSPHFLGKEMLNFAEGGSTSASYSCFNCIGDFVSNTDRQVASYTPSHQDLAIFLLGANDYMTLHKDNVIMVVEQQIDDIEKIISGGVNNVLVMGIPDLSLTPYGKHSDEKRKLKDESIAHNALLKTNVEELKEKYPQHKICYYETADAFKVIMEAASNIGYDTENPYTHHGYVHVPGAKDPQLDICPQYVFNDLVHPTQEVHHCFAIMLESFIAHHYSTE

SEQ ID NO: 55 - DNA, 1227 bp, Salmonella
atgccattgagtgttggacagggttatttcacatcatctatcagttctgaaaaatttaatgcgataaaagaaagcgcacgccttccggaattaagtttatgggagaaaatcaaagcatatttctttaccacccaccatgcagaggcgctcgaatgtatctttaatctttaccaccatcaggaactgaatctaacaccggtacaggttcgcggagcctacatcaaacttcgagccttagcgtctcagggatgtaaagaacagtttattatagaatcacaggaacacgccgataagttgattattaaagatgataatggtgaaaatattttgtctattgaggttgaatgtcatccggaagcttttggtcttgcaaaagaaatcaataaatcacatcccaagcccaaaaatatttctttgggtgatattaccagactggtattttttggcgacagcttgtctgactccttagggcgtatgtttgaaaaaacacatcatatcttaccctcctatggtcaatactttggcggaaggtttactaatggatttacctggactgagtttttatcatctccacacttcttaggtaaagagatgcttaattttgctgaagggggaagtacatcggcaagctattcctgctttaattgcatcggtgactttgtatcaaatacggacagacaagtcgcatcttacaccccttctcaccaggacctggcgatatttttattgggggctaatgactatatgacactacacaaagataatgtaataatggtcgttgagcaacaaattgatgatattgaaaaaataatttccggtggagttaataatgttctggtcatggggattcccgatttgtctttaacaccttatggcaaacattctgatgaaaaaagaaagcttaaggatgaaagcatcgctcacaatgccctgttaaaaactaatgttgaagaattaaaagaaaaatacccccagcataaaatatgctattacgagactgccgatgcatttaaggtgataatggaggcggccagtaatattggttatgatacggaaaacccttatactcaccacggctatgtacatgttcccggggctaaagaccctcagctagatatatgtccgcaatacgtcttcaacgaccttgtccatccaacccaggaagtccatcattgttttgccataatgttagaaagttttatagctcatcattattccactgaataa

SEQ ID NO: 56 - protein, 408 aa, Salmonella; identical to SEQ ID NO: 54

SEQ ID NO: 57 - protein, 336 aa, Salmonella
MIPPLNRYVPALSKNELVKTVTNRDIQFTSFNGKDYPLCFLDEKTPLLFQWFERNPARFGKNDIPIINTEKNPYLNNIIKAATIEKERLIGIFVDGDFFPGQKDAFSKLEYDYENIKVIYRNDIDFSMYDKKLSEIYMENISKQESMPEEKRDCHLLQLLKKELSDIQEGNDSLIKSYLLDKGHGWFDFYRNMAMLKAGQLFLEADKVGCYDLSTNSGCIYLDADMIITEKLGGIYIPDGIAVHVERIDGRASMENGIIAVDRNNHPALLAGLEIMHTKFDADPYSDGVCNGIRKHFNYSLNEDYNSFCDFIEFKHDNIIMNTSQFTQSSWARHVQ

SEQ ID NO: 58 - protein, 348 aa, Salmonella
MARFNAAFTRIKIMFSRIRGLISCQSNTQTIAPTLSPPSSGHVSFAGIDYPLLPLNHQTPLVFQWFERNPDRFGQNEIPIINTQKNPYLNNIINAAIIEKERIIGIFVDGDFSKGQRKALGKLEQNYRNIKVIYNSDLNYSMYDKKLTTIYLENITKLEAQSASERDEVLLNGVKKSLEDVLKNNPEETLISSHNKDKGHLWFDFYRNLFLLKGSDAFLEAGKPGCHHLQPGGGCIYLDADMLLTDKLGTLYLPDGIAIHVSRKDNHVSLENGIIAVNRSEHPALIKGLEIMHSKPYGDPYNDWLSKGLRHYFDGSHIQDYDAFCDFIEFKHENIIMNTSSLTASSWR

SEQ ID NO: 59 - protein, 336 aa, Salmonella
MPITIGNGFLKSEILTNSPRNTKEAWWKVLWEKIKDFFFSTGKAKADRCLHEMLFAERAPTRERLTEIFFELKELACASQRDRFQVHNPHENDATIILRIMDQNEENELLRITQNTDTFSCEVMGNLYFLMKDRPDILKSHPQMTAMIKRRYSEIVDYPLPSTLCLNPAGAPILSVPLDNIEGYLYTELRKGHLDGWKAQEKATYLAAKIQSGIEKTTRILHHANISESTQQNAFLETMAMCGLKQLEIPPPHTHIPIEKMVKEVLLADKTFQAFLVTDPSTSQSMLAEIVEAISDQVFHAIFRIDPQAIQKMAEEQLTTLHVRSEQQSGCLCCFL

SEQ ID NO: 60 - protein, 316 aa, Salmonella
MPITIGRGFLKSEMFSQSAISQRSFFTLLWEKIKDFFCDTQRSTADQYIKELCDVASPPDAQRLFDLFCKLYELSSPSCRGNFHFQHYKDAECQYTNLCIKDGEDIPLCIMIRQDHYYYEIMNRTVLCVDTQSAHLKRYSDINIKASTYVCEPLCCLFPERLQLSLSGGITFSVDLKNIEETLIAMAEKGNLCDWKEQERKAAISSRINLGIAQAGVTAIDDAIKNKIAAKVIENTNLKNAAFEPNYAQSSVTQIVYSCLFKNEILMNMLEESSSHGLLCLNELTEYVTLQVHNSLFSEDLSSLVETTKNEAHHQS

SEQ ID NO: 61 - protein, 291 aa, Salmonella
MPITNASPENILRYLHAAGTGTKEAMKSATSPRGILEWFVNFFTCGGVRRSNERWFREVIGKLTTSLLYVNKNAFFDGNKIFLEDVNGCTICLSCGAASENTDPMVIIEVNKNGKTVTDKVDSERFWNVCRMLKLMSKHNIQQPDSLITEDGFLNLRGVNLAHKDFQGEDLSKIDASNADFRETTLSNVNLVGANLCCANLHAVNLMGSNMTKANLTHADLTCANMSGVNLTAAILFGSDLTDTKLNGAKLDKIALTLAKALTGADLTGSQHTPTPLPDYNDRTLFPHPIF

SEQ ID NO: 62 - protein, 350 aa, Salmonella
MERSLDSLAGMAKSAFGAGTSAAMRQATSPKTILEYIINFFTCGGIRRRNETQYQELIETMAETLKSTMPDRGAPLPENIILDDMDGCRVEFNLPGENNEAGQVIVRVSKGDHSETREIPLASFEKICRALLFRCEFSLPQDSVILTAQGGMNLKGAVLTGANLTSENLCDADLSGANLEGAVLFMADCEGANFKGANLSGTSLGDSNFKNACLEDSIMCGATLDHANLTGANLQHASLLGCSMIECNCSGANMDHTNLSGATLIRADMSGATLQGATIMAAIMEGAVLTRANLRKASFISTNLDGADLAEANLNNTCFKDCTLTDLRTEDATMSTSTQTLFNEFYSENI

SEQ ID NO: 63 - protein, 319 aa, Salmonella
MPVTLSFGNRHNYEINHSRLARLMSPDKEEALYMGVWDRFKDCFRTHKKQEVLEVLYTLIHGCERENQAELNVDITGMEKIHAFTQLKEYANPSQQDRFVMRFDMNQTQVLFEIDGKVIDKCNLHRLLNVSENCIFKVMEEDEEELFLKICIKYGEKISRYPELLEGFANKLKDAVNEDDDVKDEVYKLMRSGEDRKMECVEWNGTLTEEEKNKLRCLQMGSFNITTQFFKIGYWELEGEVLFDMVHPTLSYLLQAYKPSLSSDLIETNTMLFSDVLNKDYDDYQNNKREIDAILRRIYRSHNNTLFISEKSSCRNMLI

SEQ ID NO: 64 - protein, 480 aa, Salmonella
MQYAYTSNEATSNLELLNKWRIESPDIEKEERNSIYDKIIEANHTGSLSITAHHVTSIPVFPDNLSELNLSSCYTLESIPNLPDGLKSLTISGNQTIKISYFPDSLESLSIDMQAYEENYTFPALPYGLKSFTACYGKFLPPLPPHLSSLSLQNFSEILCAELPYKLDKLDLQNCPFLPLMKMLPEELKELSIELIRTVPGTVIDDILPDKLKKLSINFCDNIKLPVKLPVNLKSINLSSRTPIAWEIPTCNLPAHIDISTDGYVKLNPEFLTRSDITFSNKPAGDVLSFQPGDVVYGLCKARDRVNTLVNSLYYFSKKDIIIQNTLTDAVWDRKNRAVFNKDEKIAERLNDVQRGIFFREFLSQHKKYNITEDKYSDLSNEECWIKTSKAGLEFQTRLRERSVIFVIDNLVDAISDIANKTGKHGNSITAHELRWVYRNRHDDLVKQNVKFFLNGEAISHEDVFSLVGWDKYKPKNRNR

SEQ ID NO: 65 - protein, 317 aa, Salmonella
MSDEALTLLFSAVENGDQNCIDLLCNLALRNDDLGHRVEKFLFDLFSGKRTGSSDIDKKINQACLVLHQIANNDITKDNTEWKKLHAPSRLLYMAGSATTDLSKKIGIAHKIMGDQFAQTDQEQVGVENLWCGARMLSSDELAAATQGLVQESPLLSVNYPIGLIHPTTKENILSTQLLEKIAQSGLSHNEVFLVNTGDHWLLCLFYKLAEKIKCLIFNTYYDLNENTKQEIIEAAKIAGISESDEVNFIEMNLQNNVPNGCGLFCYHTIQLLSNAGQNDPATTLREFAENFLTLSVEEQALFNTQTRRQIYEYSLQ

SEQ ID NO: 66 - protein, 457 aa, Salmonella
MPFTFQIGNHSCQISERYLRDIIDNKREHVFSTCEKFIDFFRNIFTRRSLISDYREIYNLLCQKKEHPDIKGPFSPGPFSKRDEDCTRWRPLLGYIKLIDASRPETIDKYTVEVLAHQENMLLLQMFYDGVLVTETECSERCVDFLKETMFNYNNGEITLAALGNDNLPPSEAGSNGIYEAFEQRLIDFLTTPATASGYESGAIDQTDASQPAAIEAFINSPEFQKNIRMRDIEKNKIGSGSYGTVYRLHDDFVVKIPVNERGIKVDVNSPEHRNCHPDRVSKYLNMANDDKNFSRSAIMNINGKDVTVLVSKYIQGQEFDVEDEDNYRMAEALLKSRGVYMHDINILGNILVKEGVLFFVDGDQIVLSQESRQQRSVSLATRQLEEQIKAHHMIKLKRAETEGNTEDVEYYKSLITDLDALIGEEEQTPAPGRRFKLAAPEEGTLVAKVLKDELKK

SEQ ID NO: 67 - protein, 700 aa, Salmonella
MFNIRNTQPSVSMQAIAGAAAPEASPEEIVWEKIQVFFPQENYEEAQQCLAELCHPARGMLPDHISSQFARLKALTFPAWEENIQCNRDGINQFCILDAGSKEILSITLDDAGNYTVNCQGYSEAHDFIMDTEPGEECTEFAEGASGTSLRPATTVSQKAAEYDAVWSKWERDAPAGESPGRAAVVQEMRDCLNNGNPVLNVGASGLTTLPDRLPPHITTLVIPDNNLTSLPELPEGLRELEVSGNLQLTSLPSLPQGLQKLWAYNNWLASLPTLPPGLGDLAVSNNQLTSLPEMPPALRELRVSGNNLTSLPALPSGLQKLWAYNNRLTSLPEMSPGLQELDVSHNQLTRLPQSLTGLSSAARVYLDGNPLSVRTLQALRDIIGHSGIRIHFDMAGPSVPREARALHLAVADWLTSAREGEAAQADRWQAFGLEDNAAAFSLVLDRLRETENFKKDAGFKAQISSWLTQLAEDAALRAKTFAMATEATSTCEDRVTHALHQMNNVQLVHNAEKGEYDNNLQGLVSTGREMFRLATLEQIAREKAGTLALVDDVEVYLAFQNKLKESLELTSVTSEMRFFDVSGVTVSDLQAAELQVKTAENSGFSKWILQWGPLHSVLERKVPERFNALREKQISDYEDTYRKLYDEVLKSSGLVDDTDAERTIGVSAMDSAKKEFLDGLRALVDEVLGSYLTARWRLN

SEQ ID NO: 68 - protein, 788 aa, Salmonella
MPFHIGSGCLPATISNRRIYRIAWSDTPPEMSSWEKMKEFFCSTHQTEALECIWTICHPPAGTTREDVINRFELLRTLAYAGWEESIHSGQHGENYFCILDEDSQEILSVTLDDAGNYTVNCQGYSETHRLTLDTAQGEEGTGHAEGASGTFRTSFLPATTAPQTPAEYDAVWSAWRRAAPAEESRGRAAVVQKMRACLNNGNAVLNVGESGLTTLPDCLPAHITTLVIPDNNLTSLPALPPELRTLEVSGNQLTSLPVLPPGLLELSIFSNPLTHLPALPSGLCKLWIFGNQLTSLPVLPPGLQELSVSDNQLASLPALPSELCKLWAYNNQLTSLPMLPSGLQELSVSDNQLASLPTLPSELYKLWAYNNRLTSLPALPSGLKELIVSGNRLTSLPVLPSELKELMVSGNRLTSLPMLPSGLLSLSVYRNQLTRLPESLIHLSSETTVNLEGNPLSERTLQALREITSAPGYSGPIIRFDMAGASAPRETRALHLAAADWLVPAREGEPAPADRWHMFGQEDNADAFSLFLDRLSETENFIKDAGFKAQISSWLAQLAEDEALRANTFAMATEATSSCEDRVTFFLHQMKNVQLVHNAEKGQYDNDLAALVATGREMFRLGKLEQIAREKVRTLALVDEIEVWLAYQNKLKKSLGLTSVTSEMRFFDVSGVTVTDLQDAELQVKAAEKSEFREWILQWGPLHRVLERKAPERVNALREKQISDYEETYRMLSDTELRPSGLVGNTDAERTIGARAMESAKKTFLDGLRPLVEEMLGSYLNVQWRRN

SEQ ID NO: 69 - protein, 385 aa, Salmonella
MMASRDKDADSLIMYDRTLLWLTFGLAAIGFVMVTSASMPVGQRLANDPFLFAKRDALYIFLAFCLAMVTLRLPMTFWQKYSTTMLIASIIMLLIVLVVGSSVNGASRWIALGPLRIQPAEFTKLSLFCYLANYLVRKVDEVRNNLRGFLKPMGVILVLAVLLLAQPDLGTVVVLFVTTLAMLFLAGAKLWQFIAIIGMGISAVILLILAEPYRIRRVTSFWNPWEDPFGSGYQLTQSLMAFGRGEIWGQGLGNSVQKLEYLPEAHTDFIFAIIGEELGYIGVVLALLMVFFVAFRAMSIGRKALEIDHRFSGFLACSIGIWFSFQALVNVGAAAGMLPTKGLTLPLISYGGSSLLIMSTAIMFLLRIDYETRLEKAQAFTRGSR

SEQ ID NO: 70 - protein, 420 aa, Salmonella
MIKATDRKLVVGLEIGTAKVAALVGEVLPDGMVNIIGVGSCPSRGMDKGGVNDLESVVKCVQRAIDQAELMADCQISSVYLALSGKHISCQNEIGMVPISEEEVTQEDVENVVHTAKSVRVRDEHRVLHVIPQEYAIDYQEGIKNPVGLSGVRMQAKVHLITCHNDMAKNIVKAVERCGLKVDQLIFAGLAASYSVLTEDERELGVCVVDIGGGTMDIAVYTGGALRHTKVIPYAGNVVTSDIAYAFGTPPSDAEAIKVRHGCALGSIVGKDESVEVPSVGGRPPRSLQRQTLAEVIEPRYTELLNLVNEEILQLQEQLRQQGVKHHLAAGIVLTGGAAQIEGLAACAQRVFHTQVRIGAPLNITGLTDYAQEPYYSTAVGLLHYGKESHLNGEAEVEKRVTASVGSWIKRLNSWLRKEF

SEQ ID NO: 71 - protein, 383 aa, Salmonella
MFEPMELTNDAVIKVIGVGGGGGNAVEHMVRERIEGVEFFAVNTDAQALRKTAVGQTIQIGSGITKGLGAGANPEVGRNAADEDREALRAALEGADMVFIAAGMGGGTGTGAAPVVAEVAKDLGILTVAVVTKPFNFEGKKRMAFAEQGITELSKHVDSLITIPNDKLLKVLGRGISLLDAFGAANDVLKGAVQGIAELITRPGLMNVDFADVRTVMSEMGYAMMGSGVASGEDRAEEAAEMAISSPLLEDIDLSGARGVLVNITAGFDLRLDEFETVGNTIRAFASDNATVVIGTSLDPDMNDELRVTVVATGIGMDKRPEITLVTNKQVQQPVLDRYQQHGMAPLTQEQKTVAKVVNDNTPQAAKEPDYLDIPAFLRKQAD

SEQ ID NO: 72 - protein, 495 aa, Salmonella
MADRNLRDLLAPWVAGLPARELREMTLDSRVAAAGDLFVAVVGHQADGRRYIPQAIAQGVAAIIAEAKDEASDGEIREMHGVPVVYLSQLNERLSALAGRFYHEPSENMRLVAVTGTNGKTTTTQLLAQWSQLLGETSAVMGTVGNGLLGKVIPTENTTGSAVDVQHVLASLVAQGATFGAMEVSSHGLVQHRVAALKFAASVFTNLSRDHLDYHGDMAHYEAAKWMLYSTHHHGQAIVNADDEVGRRWLASLPDAVAVSMEGHINPNCHGRWLKAEAVEYHDRGATIRFASSWGEGEIESRLMGAFNVSNLLLALATLLALGYPLTDLLKTAARLQPVCGRMEVFTAPGKPTVVVDYAHTPDALEKALQAARLHCAGKLWCVFGCGGDRDKGKRPLMGAIAEEFADIVVVTDDNPRTEEPRAIINDILAGMLDAGQVRVMEGRAEAVTNAIMQAKDNDVVLIAGKGHEDYQIVGTQRLDYSDRVTAARLLGVIA

SEQ ID NO: 73 - protein, 440 aa, Salmonella
MSEFSQTVPELVAWARKNDFSISLPVDRLSFLLAVATLNGERLDGEMSEGELVDAFRHVSDAFEQTSETIGVRANNAINDMVRQRLLNRFTSEQAEGNAIYRLTPLGIGITDYYIRQREFSTLRLSMQLSIVAGELKRAADAAAEGGDEFHWHRNVYAPLKYSVAEIFDSIDLTQRIMDEQQQQVKDDIAQLLNKDWRAAISSCELLLSETSGTLRELQDTLEAAGDKLQANLLRIQDATMTHDDLHFVDRLVFDLQSKLDRIISWGQQSIDLWIGYDRHVHKFIRTAIDMDKNRVFAQRLRQSVQTYFDDPWALTYANADRLLDMRDEEMALRDDEVTGELPPDLEYEEFNEIREQLAAIIEEQLAIYKTRQTPLDLGLVVREYLAQYPRARHFDVARIVIDQAVRLGVAQADFTGLPAKWQPINDYGAKVQAHVIDKY

SEQ ID NO: 74 - protein, 786 aa, Salmonella
MKKRIPTLLATMIASALYSHQGLAADLASQCMLGVPSYDRPLVKGDTNDLPVTINADNAKGNYPDDAVFTGNVDIMQGNSRLQADEVQLHQKQAEGQPEPVRTVDALGNVHYDDNQVILKGPKGWANLNTKDTNVWEGDYQMVGRQGRGKADLMKQRGENRYTILENGSFTSCLPGSDTWSVVGSEVIHDREEQVAEIWNARFKVGPVPIFYSPYLQLPVGDKRRSGFLIPNAKYTTKNYFEFYLPYYWNIAPNMDATITPHYMHRRGNIMWENEFRYLTQAGEGVMELDYLPSDKVYEDDHPKEGDKHRWLFNWQHSGVMDQVWRFNVDYTKVSDSSYFNDFDSKYGSSTDGYATQKFSVGYAVQNFDATVSTKQFQVFNDQNTSSYSAEPQLDVNYYHNDLGPFDTRIYGQAVHFVNTKDNMPEATRVHLEPTINLPLSNRWGSLNTEAKLMATHYQQTNLDSYNSDPNNKNKLEDSVNRVMPQFKVDGKLIFERDMAMLAPGYTQTLEPRVQYLYVPYRDQSGIYNYDSSLLQSDYNGLFRDRTYGGLDRIASANQVTTGVTTRIYDDAAVERFNVSVGQIYYFTESRTGDDNIKWENDDKTGSLVWAGDTYWRISERWGLRSGVQYDTRLDSVATSSSSLEYRRDQDRLVQLNYRYASPEYIQATLPSYYSTAEQYKNGINQVGAVASWPIADRWSIVGAYYFDTNSSKPADQMLGLQYNSCCYAIRVGYERKLNGWDNDKQHAIYDNAIGFNIELRGLSSNYGLGTQEMLRSNILPYQSSM

SEQ ID NO: 75 - protein, 323 aa, Salmonella
MAQEYTVEQLNHGRKVYDFMRWDFWAFGISGLLLIAAIVIMGVRGFNWGLDFTGGTVIEITLEKPAEMDVMREALQKAGYEEPQLQNFGSSHDIMVRMPPTEGETGGQVLGSKVVTIINEATNQNAAVKRIEFVGPSVGADLAQTGAMALLVALISILVYVGFRFEWRLAAGVVIALAHDVIITLGILSLFHIEIDLTIVASLMSVIGYSLNDSIVVSDRIRENFRKIRRGTPYEIFNVSLTQTLHRTLITSGTTLVVILMLYLFGGPVLEGFSLTMLIGVSIGTASSIYVASALALKLGMKREHMLQQKVEKEGADQPSILP

SEQ ID NO: 76 - protein, 432 aa, Salmonella
MSKIVKVIGREIIDSRGNPTVEAEVHLEGGFVGMAAAPSGASTGSREALELRDGDKSRFLGKGVTKAVGAVNGPIAQAILGKDAKDQAGIDKIMIDLDGTENKSNFGANAILAVSLANAKAAAAAKGMPLYEHIAELNGTPGKYSMPVPMMNIINGGEHADNNVDIQEFMIQPVGAKTVKEAIRMGSEVFHHLAKVLKGKGMNTAVGDEGGYAPNLGSNAEALAVIAEAVKAAGYELGKDITLAMDCAASEFYKDGKYVLAGEGNKAFTSEEFTHFLEELTKQYPIVSIEDGLDESDWDGFAYQTKVLGDKIQLVGDDLFVTNTKILKEGIEKGIANSILIKFNQIGSLTETLAAIKMAKDAGYTAVISHRSGETEDATIADLAVGTAAGQIKTGSMSRSDRVAKYNQLIRIEEALGEKAPYNGRKEIKGQA

SEQ ID NO: 77 - protein, 320 aa, Salmonella
MRQTKTGILLANLGTPDAPTPEAVKRYLKQFLSDRRVVDTPRLLWWPLLRGVILPLRSPRVAKLYQSIWMDGGSPLMVYSREQQQALAARLPDTPVALGMSYGSPSLESAVDELLASDVDHIVVLPLYPQYSCSTVGAVWDELGRILARKRRIPGISFIRDYADDGAYIDALAKSARESFARHGEPDVLLLSYHGIPQRYADEGDDYPQRCRDTTRELVSALGLPPEKVMMTFQSRFGREPWLTPYTDETLKMLGEKGTGHIQVMCPGFAADCLETLEEIAEQNREIFLEAGGKKYAYIPALNATPEHIDMMLKLTAPYR

SEQ ID NO: 78 - protein, 213 aa, Salmonella
MGSNYIVIEGLEGAGKTTARDVVVETLEQLGIRNMIFTREPGGTQLAEKLRSLVLDIRSVGDEVITDKAEVLMFYAARVQLVETVIKPALAQGVWVIGDRHDLSTQAYQGGGRGIDQTMLATLRDAVLGDFRPDLTLYLDVTPEVGLKRARARGDLDRIEQESFDFFNRTRARYLELAAQDSRIRTIDATQPLDAVMRDIRATVTKWVQEQAA

SEQ ID NO: 79 - protein, 620 aa, Salmonella
MSFDIAKYPTLALVDSTQELRLLPKESLPKLCDELRRYLLDSVSRSSGHFASGLGTVELTVALHYVYNTPFDQLIWDVGHQAYPHKILTGRRDKIGTIRQKGGLHPFPWRGESEYDVLSVGHSSTSISAGIGIAVAAEKEGKDRRTVCVIGDGAITAGMAFEAMNHAGDIRPDMLVILNDNEMSISENVGALNNHLAQLLSGKLYSSLREGGKKVFSGVPPIKELLKRTEEHIKGMVVPGTLFEELGFNYIGPVDGHDVMGLISTLKNMRDLKGPQFLHIMTKKGRGYEPAEKDPITFHAVPKFDPSSGCLPKSSGGLPGYSKIFGDWLCETAAKDSKLMAITPAMREGSGMVEFSRKFPDRYFDVAIAEQHAVTFAAGLAIGGYKPVVAIYSTFLQRAYDQVIHDVAIQKLPVMFAIDRAGIVGADGQTHQGAFDLSYLRCIPDMVIMTPSDENECRQMLFTGYHYNDGPTAVRYPRGNAQGVALTPLEKLPIGKGLVKRHGEKLAILNFGTLMPEAAKVAEALNATLVDMRFVKPLDDTLILEMAAQHDALVTLEENAIMGGAGSGVNEVLMAHRKPVPVLNIGLPDFFIPQGTQEEARAELGLDAAGIEAKIKAWLA

SEQ ID NO: 80 - protein, 252 aa, Salmonella
MLSATQPVSENLPAHGCRHVAIIMDGNGRWAKKQGKIRAFGHKAGAKSVRRAVSFAANNGIDALTLYAFSSENWNRPAQEVSALMELFVWALDSEVKSLHRHNVRLRIIGDISRFNSRLQERIRKSEALTAHNTGLTLNIAANYGGRWDIVQGVRQLAEQVQAGVLRPDQIDEERLGQQICMHELAPVDLVIRTGGEHRISNFLLWQIAYAELYFTDVLWPDFDEQDFEGALHAFANRERRFGGTEPGDDKA

SEQ ID NO: 81 - protein, 285 aa, Salmonella
MLKYRLISAFVLIPAVIAALFLLPPVGFAIITLVVCMLAAWEWGQLSGFAARSQRVWLAVLCGLLLALMLFLLPEYHHNIRQPLVEMSLWASLGWWVVALLLVLFYPGSAAIWRNSKTLRLIFGLLTIVPFFWGMLALRAWHYDENHYSGAIWLLYVMILVWGADSGAYMFGKLFGKHKLAPKVSPGKTWQGFIGGLATAAVISWGYGMWANLNVAPVILLICSVVAALASVLGDLTESMFKREAGIKDSGHLIPGHGGILDRIDSLTAAVPVFACLLLLVFRTL

SEQ ID NO: 82 - protein, 319 aa, Salmonella
MSLNFLDFEQPIAELEAKIDSLTAVSRQDEKLDINIDEEVHRLREKSVELTRKIFADLGAWQVAQLARHPQRPYTLDYVRLAFDEFDELAGDRAYADDKAIVGGIARLEGRPVMIIGHQKGRETKEKIRRNFGMPAPEGYRKALRLMEMAERFNMPIITFIDTPGAYPGVGAEERGQSEAIARNLREMSRLNVPVICTVIGEGGSGGALAIGVGDKVNMLQYSTYSVISPEGCASILWKSADKAPLAAEAMGIIAPRLKELKLIDSIIPEPLGGAHRNPEAMAASLKAQLLEDLADLDVLSTDDLKNRRYQRLMSYGYA

SEQ ID NO: 83 - protein, 451 aa, Salmonella
MLSKFKRNKHQQHLAQLPKISQSVDDVDFFYTPATFRETLLEKIASATQRICIVALYLEQDDGGKGILDALYAAKRQRPELDVRVLVDWHRAQRGRIGAAASNTNADWYCRLAQENPGIDVPVYGVPINTREALGVLHFKGFIIDDSVLYSGASLNDVYLHQHDKYRYDRYQLIRNRQMADIMFDWVTQNLMNGRGVNRLDNTQRPKSPEIKNDIRLYRQELRDASYHFQGDANDEQLSVTPLVGLGKSSLLNKTIFHLMPCAEHKLTICTPYFNLPAVLVRNIIQLLRDGKKVEIIVGDKTANDFYIPEDEPFKIIGALPYLYEINLRRFLSRLQYYVNTDQLVVRLWKDDDNTYHLKGMWVDDKWMLLTGNNLNPRAWRLDLENAILIHDPKQELAPQREKELELIRTHTTIVKHYRDLQSIADYPIKVRKLIRRLRRIRIDRLISRIL

SEQ ID NO: 84 - protein, 582 aa, Salmonella
MHNDKDLSTWQTFRRLWPTIAPFKAGLIVAGIALILNAASDTFMLSLLKPLLDDGFGKTDRSVLLWMPLVVIGLMILRGITSYISSYCISWVSGKVVMTMRRRLFGHMMGMPVAFFDKQSTGTLLSRITYDSEQVASSSSGALITVVREGASIIGLFIMMFYYSWQLSIILVVLAPIVSIAIRVVSKRFRSISKNMQNTMGQVTTSAEQMLKGHKEVLIFGGQEVETKRFDKVSNKMRLQGMKMVSASSISDPIIQLIASLALAFVLYAASFPSVMDSLTAGTITVVFSSMIALMRPLKSLTNVNAQFQRGMAACQTLFAILDSEQEKDEGKRVIDRATGDLEFRNVTFTYPGREVPALRNINLKIPAGKTVALVGRSGSGKSTIASLITRFYDIDEGHILMDGHDLREYTLASLRNQVALVSQNVHLFNDTVANNIAYARTEEYSREQIEEAARMAYAMDFINKMDNGLDTIIGENGVLLSGGQRQRIAIARALLRDSPILILDEATSALDTESERAIQAALDELQKNRTSLVIAHRLSTIEQADEIVVVEDGIIVERGTHSELLAQHGVYAQLHKMQFGQ

SEQ ID NO: 85 - protein, 283 aa, Salmonella
MAEITASLVKELRERTGAGMMDCKKALTEANGDIELAIENMRKSGAIKAAKKAGNVAADGVIKTKIDGNVAFILEVNCQTDFVAKDAGFQAFADKVLDAAVAGKITDVEVLKAQFEEERVALVAKIGENINIRRVASLEGDVLGSYQHGARIGVLVAAKGADEELVKQLAMHVAASKPEFVKPEDVSADVVEKEYQVQLDIAMQSGKPKEIAEKMVEGRMKKFTGEVSLTGQPFVMEPSKSVGQLLKEHNADVTGFIRFEVGEGIEKVETDFAAEVAAMSKQS

SEQ ID NO: 86 - protein, 255 aa, Salmonella
MFIGIVSLFPEMFRAITDYGVTGRAVKKGLLNIQSWSPRDFAHDRHRTVDDRPYGGGPGMLMMVQPLRDAIHAAKAAAGEGAKVIYLSPQGRKLDQAGVSELATNQKLILVCGRYEGVDERVIQTEIDEEWSIGDYVLSGGELPAMTLIDSVARFIPGVLGHEASAIEDSFADGLLDCPHYTRPEVLEGMEVPPVLLSGNHAEIRRWRLKQSLGRTWLRRPELLENLALTEEQARLLAEFKTEHAQQQHKHDGMA

SEQ ID NO: 87 - protein, 413 aa, Salmonella
MKIYLVGGAVRDALLGLPVKDKDWVVVGATPQEMLDAGYQQVGRDFPVFLHPQTHEEYALARTERKSGSGYTGFTCYAAPDVTLEADLQRRDLTINALARDDAGQIIDPYHGRRDLEARLLRHVSPAFGEDPLRVLRVARFAARYAHLSFRIADETLALMREMTAAGELEHLTPERVWKETENALTTRNPQVYFQVLRDCGALRVLFPEIDALFGVPAPAKWHPEIDTGVHTLMTLSMAAMLSPQLDVRFATLCHDLGKGLTPKNLWPRHHGHGPAGVKLVEQLCQRLRVPNDLRDLAKLVAEYHDLIHTFPILQPKTIVKLFDAIDAWRKPQRVEQIALTSEADVRGRTGFEASDYPQGRWLREAWQVAQAVPTKEVVEAGFKGIEIREELTKRRIAAVANWKEKRCPNPAS

SEQ ID NO: 88 - protein, 892 aa, Salmonella
MTDVTLKALAAERQVSVDRLVQQFADAGIRKSADDSVSAQEKQTLLAHLNREAVSGPDKLTLQRKTRSTLNIPGTGGKSKSVQIEVRKKRTFVKRDPQEAERLAAEEQAQREAEEQARREAEEQAKREAQQKAEREAAEQAKREAAEKAKREAAEKDKVSNQQTDDMTKTAQAEKARRENEAAELKRKAEEEARRKLEEEARRVAEEARRMAEENKWTATPEBVEDTSDYHVTTSQHARQAEDENDREVEGGRGRGRNAKAARPAKKGKHAESKADREEARAAVRGGKGGKRKGSSLQQGFQKPAQAVNRDVVIGETITVGELANKMAVKGSQVIKAMMKLGAMATINQVIDQETAQLVAEEMGHKVILRRENELEEAVMSDRDTGAAAEPRAPVVTIMGHVDHGKTSLLDYIRSTKVASGEAGGITQHIGAYHVETDNGMITFLDTPGHAAFTSMRARGAQATDIVVLVVAADDGVMPQTIEAIQHAKAAGVPVVVAVNKIDKPEADPDRVKNELSQYGILPEEWGGESQFVHVSAKAGTGIDELLDAILLQAEVLELKAVRKGMASGAVIESFLDKGRGPVATVLVREGTLHKGDIVLCGFEYGRVRAMRNELGQEVLEAGPSIPVEILGLSGVPAAGDEVTVVRDEKKAREVALYRQGKFREVKLARQQKSKLENMFANMTEGEVHEVNIVLKADVQGSVEAISDSLLKLSTDEVKVKIIGSGVGGITETDATLAAASNAILVGFNVRADASARKVIESESLDLRYYSVIYNLIDEVKAAMSGMLSPELKQQIIGLAEVRDVFKSPKFGAIAGCMVTEGTIKRHNPIRVLRDNVVIYEGELESLRRFKDDVNEVRNGMECGIGVKNYNDVRVGDMIEVFEIIEIQRTIA

SEQ ID NO: 89 - protein, 329 aa, Salmonella [sequence omitted]

SEQ ID NO: 90 - protein, 1342 aa, Salmonella
MVYSYTEKKRIRKDFGKRPQVLDVPYLLSIQLDSFQKFIEQDPEGQYGLEAAFRSVFPIQSYSGNSELQYVSYRLGEBVFDVQECQIRGVTYSAPLRVKLRLVIYEREAPEGTVKDIKEQEVYMGEIPLMTDNGTFVINGTERVIVSQLHRSPGVFFDSDKGKTHSSGKVLYNARIIPYRGSWLDFEFDPKDNLFVRIDRRRKLPATIILRALNYTTEQILDLFFEKVVFEIRDNKLQMELIPERLRGETASFDIEANGKVYVEKGRRITARHIRQLEKDDIKHIEVPVEYIAGKVVSKDYVDESTGELICAANMELSLDLLAKLSQSGHKRIETLFTNDLDHGPYISETVRVDPTNDRLSALVEIYRMMRPGEPPTREAAESLFENLFFSEDRYDLSAVGRMKFNRSLLRDEIEGSGILSKDDIIDVMKKLIDIRNGKGEVDDIDHLGNRRIRSVGEMAENQFRVGLVRVERAVKERLSLGDLDTLMPQDMINAKPISAAVKEFFGSSQLSQFMDQNNPLSEITHKRRISALGPGGLTRERAGFEVRDVHPTHYGRVCPIETPEGPNIGLINSLSVYAQTNEYGFLETPYRRVVDGVVTDEIHYLSAIEEGNYVIAQANSNLDDEGHFVEDLVTCRSKGESSLFSRDQVDYMDVSTQQVVSVGASLIPFLEHDDANRALMGANMQRQAVPTLRADKPLVGTGMERAVAVDSGVTAVAKRGGTVQYVDASRIVIKVNEDEMYPGEAGIDIYNLTKYTRSNQNTCINQMPCVSLGEBVERGDVLADGPSTDLGELALGQNMRVAFMPWNGYNFEDSILVSERVVQEDRFTTIHIQELACVSRDTKLGPEEITADIPNVGEAALSKLDESGIVYIGAEVTGGDILVGKVTPKGETQLTPEEKLLRAIFGEKASDVKDSSLRVPNGVSGTVIDVQVFTRDGVEKDKRALEIEEMQLKQAKKDLSEELQILEAGLFSRIRAVLVSSGVEAEKLDKLPRDRWLELGLTDEEKQNQLEQLAEQYDELKHEFEKKLEAKRRKITQGDDLAPGVLKIVKVYLAVKRRIQPGDKMAGRHGNKGVISKINPIEDMPYDENGTPVDIVLNPLGVPSRMNIGQILETHLGMAAKGIGDKINAMLKQQQEVAKLREFIQRAYDLGADVRQKVDLSTFSDDEVLRLAENLRKGMPIATPVFDGAKEAEIKELLKLGDLPTSGQITLFDGRTGEQFERPVTVGYMYMLKLNHLVDDKMHARSTGSYSLVTQQPLGGKAQFGGQRFGEMEVWALEAYGAAYTLQEMLTVKSDDVNGRTKMYKNIVDGNHQMEPGMPESFNVLLKEIRSLGINIELEDE

SEQ ID NO: 91 - protein, 1407 aa, Salmonella
MKDLLKFLKAQTKTEEFDAIKIALASPDMIRSWSFGEVKKPETINYRTFKPERDGLFCARIFGPVKDYECLCGKYKRLKHRGVICEKCGVEVTQTKVRRERMGHIELASPTAHIWFLKSLPSRIGLLLDMPLRDIERVLYFESYVVIEGGMTNLERQQILTEEQYLDALEEFGDEFDAKMGAEAIQALLKSMDLEQECETLREELNETNSETKRKKLTKRIKLLEAFVQSGNKPEWMILTVLPVLPPDLRPLVPLDGGRFATSDLNDLYRRVINRNNRLKRLLDLAAPDIIVRNEKRMLQEAVDALLDNGRRGRAITGSNKRPLKSLADMIKGKQGRFRQNLLGKRVDYSGRSVITVGPYLRLHQCGLPKKMALELFKPFIYGKLELRGLATTIKAAKKMVEREEAVVWDILDEVIREHPVLLNRAPTLHRLGIQAFEBVLIEGKAIQLHPLVCAAYNADFDGDQMAVHVPLTLEAQLEARALMMSTNNILSPANGEPIIVPSQDVVLGLYYMTRDCVNAKGEGMVLTGPKEAERIYRAGLASLHARVKVRITEYEKDENGEFVAHTSLKDTTVGRAILWMIVPKGLPFSIVNQALGKKAISKMLNTCYRILGLKPTVIFADQTMYTGFAYAARSGASVGIDDMVIPEKKHEIISEAEAEVAEIQEQFQSGLVTAGERYNKVIDIWAAANDRVSKAMMDNLQTETVINRDGQEEQQVSFNSIYMMADSGARGSAAQIRQLAGMRGLMAKPDGSIIETPITANFREGLNVLQYFISTHGARKGLADTALKTANSGYLTRRLVDVAQDLVVTEDDCGTHEGILMTPVIEGGDVKEPLRDRVLGRVTAEDVLKPGTADILVPRNTLLHEQWCDLLEANSVDAVKVRSVVSCDTDFGVCAHCYGRDLARGHIINKGEAIGVIAAQSIGEPGTQLTMRTFHIGGAASRAAAESSIQVKNKGSIKLSNVKSVVNSSGKLVITSRNTELKLIDEFGRTKESYKVPYGAVMAKGDGEQVAGGETVANWDPHTMPVITEVSGFIRFTDMIDGQTITRQTDELTGLSSLVVLDSAERTTGGKDLRPALKIVDAQGNDVLIPGTDMPAQYFLPGKAIVQLEDGVQISSGDTLARIPQESGGTKDITGGLPRVADLFEARRPKEPAILAEIAGIVSFGKETKGKRRLVITPVDGSDPYEEMIPKWRQLNVFEGERVERGDVISDGPEAPHDILRLRGVHAVTRYIVNEVQDVYRLQGVKINDKHIEVIVRQMLRKATIESAGSSDFLEGEQVEYSRVKIANRELEANGKVGATFSRDLLGITKASLATESFISAASFQETTRVLTEAAVAGKRDELRGLKENVIVGRLIPAGTGYAYHQDRMRRRAAGEQPATPQVTAEDASASLAELLNAGLGGSDNE

SEQ ID NO: 92 - protein, 343 aa, Salmonella
MIRLYPEQLRAQLNEGLRAAYLLLGNDPLLLQESQDAIRLAAASQGFEEHHAFTLDPSTDWGSLFSLCQAMSLFASRQTLVLQLPENGPNAAMNEQLATLSELLHDDLLLIVRGNKLTKAQENAAWYTALADRSVQVSCQTPEQAQLPRWVAARAKAQNLQLDDAANQLLCYCYEGNLLALAQALERLSLLWPDGKLTLPRVEQAVNDAAHFTPFHWVDALLMGKSKRALHILQQLRLEGSEBVILLRTLQRELLLLVNLKRQSAHTPLRALFDKHRVWQNRRPMIGDALQRLHPAQLRQAVQLLTRTEITLKQDYGQSVWADLEGLSLLLCHKALADVFIDG

SEQ ID NO: 93 - protein, 245 aa, Salmonella
MKNVGDLMQRLQKMMPAHITPAFKTGEELLAWQKEQGEIRAAALARENRAMKMQRTFNRSGIRPLHQNCSFDNYRVECDGQMNALSKARQYVDEFDGNIASFVFSGKPGTGKNHLAAAICNELLLRGKSVLIITVADIMSAMKDTFSNRETSEEQLLNDLSNVDLLVIDEIGVQTESRYEKVIINQIVDRRSSSKRPTGMLTNSNMEEMTKMLGERVMDRMRLGNSLWVNFTWDSYRSRVTGKEY

SEQ ID NO: 94 - protein, 490 aa, Salmonella
MVPVVALVGRPNVGKSTLFNRLTRTRDALVADFPGLTRDRKYGRAEVEGREFICIDTGGIDGTEDGVETRMAEQSLLAIEEADVVLFMVDARAGLMPADEAIAKHLRSREKPTFLVANKTDGLDPDQAVVDFYSLGLGEIYPIAASHGRGVLSLLEHVLLPWMDDVAPQEEVDEDAEYWAQFEAEQNGEEAPEDDFDPQSLPIKLAIVGRPNVGKSTLTNRILGEERVVVYDMPGTTRDSIYIPMERDEREYVLIDTAGVRKRGKITDAVEKFSVIKTLQAIEDANVVLLVIDAREGISDQDLSLLGFILNSGRSLVIVVNKWDGLSQEVKEQVKETLDFRLGFIDFARVHFISALHGSGVGNLFESVREAYDSSTRRVSTAMLTRIMTMAVEDHQPPLVRGRRVKLKYAHAGGYNPPIVVIHGNQVKDLPDSYKRYLMNYFRKSLEVMGTPIRIQFKEGENPYANKRNTLTPTQMRKRKRLMKHIKKSK

SEQ ID NO: 95 - protein, 199 aa, Salmonella
MMSAPDIRHLPSDCGIEVAFAGRSNAGKSSALNTLTNQKSLARTSKTPGRTQLINLFEVVDGKRLVDLPGYGYAEVPEEMKRKWQRALGEYLEKRQSLQGLVVLMDIRHPLKDLDQQMIQWAVESNIQVLVLLTKADKLASGARKAQLNMVREAVLAFNGDVQVEAFSSLKKQGVDKLRQKLDSWFSELAPVEEIQDGE

SEQ ID NO: 96 - DNA, 1223 bp, Artificial Sequence
  A synthetic sequence
ttatgacaacttgacggctacatcattcactttttcttcacaaccggcacggaactcgctcgggctggccccggtgcattttttaaatacccgcgagaaatagagttgatcgtcaaaaccaacattgcgaccgacggtggcgataggcatccgggtggtgctcaaaagcagcttcgcctggctgatacgttggtcctcgcgccagcttaagacgctaatccctaactgctggcggaaaagatgtgacagacgcgacggcgacaagcaaacatgctgtgcgacgctggcgatatcaaaattgctgtctgccaggtgatcgctgatgtactgacaagcctcgcgtacccgattatccatcggtggatggagcgactcgttaatcgcttccatgcgccgcagtaacaattgctcaagcagatttatcgccagcagctccgaatagcgcccttccccttgcccggcgttaatgatttgcccaaacaggtcgctgaaatgcggctggtgcgcttcatccgggcgaaagaaccccgtattggcaaatattgacggccagttaagccattcatgccagtaggcgcgcggacgaaagtaaacccactggtgataccattcgcgagcctccggatgacgaccgtagtgatgaatctctcctggcgggaacagcaaaatatcacccggtcggcaaacaaattctcgtccctgatttttcaccaccccctgaccgcgaatggtgagattgagaatataacctttcattcccagcggtcggtcgataaaaaaatcgagataaccgttggcctcaatcggcgttaaacccgccaccagatgggcattaaacgagtatcccggcagcaggggatcattttgcgcttcagccatacttttcatactcccgccattcagagaagaaaccaattgtccatattgcatcagacattgccgtcactgcgtcttttactggctcttctcgctaaccaaaccggtaaccccgcttattaaaagcattctgtaacaaagcgggaccaaagccatgacaaaaacgcgtaacaaaagtgtctataatcacggcagaaaagtccacattgattatttgcacggcgtcacactttgctatgccatagcatttttatccataagattagcggatcctacctgacgctttttatcgcaactctctactgtttctccatacccgttttttgggctaacaggaggaattaacc

SEQ ID NO: 97 - DNA, 318 bp, Artificial Sequence
  A synthetic sequence
aagaaaccaattgtccatattgcatcagacattgccgtcactgcgtcttttactggctcttctcgctaaccaaaccggtaaccccgcttattaaaagcattctgtaacaaagcgggaccaaagccatgacaaaaacgcgtaacaaaagtgtctataatcacggcagaaaagtccacattgattatttgcacggcgtcacactttgctatgccatagcatttttatccataagattagcggatcctacctgacgctttttatcgcaactctctactgtttctccatacccgttttttgggctaacaggaggaattaacc

SEQ ID NO: 98 - DNA, 879 bp, Artificial Sequence
  A synthetic sequence
atggctgaagcgcaaaatgatcccctgctgccgggatactcgtttaatgcccatctggtggcgggtttaacgccgattgaggccaacggttatctcgatttttttatcgaccgaccgctgggaatgaaaggttatattctcaatctcaccattcgcggtcagggggtggtgaaaaatcagggacgagaatttgtttgccgaccgggtgatattttgctgttcccgccaggagagattcatcactacggtcgtcatccggaggctcgcgaatggtatcaccagtgggtttactttcgtccgcgcgcctactggcatgaatggcttaactggccgtcaatatttgccaatacggggttctttcgcccggatgaagcgcaccagccgcatttcagcgacctgtttgggcaaatcattaacgccgggcaaggggaagggcgctattcggagctgctggcgataaatctgcttgagcaattgttactgcggcgcatggaagcgattaacgagtcgctccatccaccgatggataatcgggtacgcgaggcttgtcagtacatcagcgatcacctggcagacagcaattttgatatcgccagcgtcgcacagcatgtttgcttgtcgccgtcgcgtctgtcacatcttttccgccagcagttagggattagcgtcttaagctggcgcgaggaccaacgtatcagccaggcgaagctgcttttgagcaccacccggatgcctatcgccaccgtcggtcgcaatgttggttttgacgatcaactctatttctcgcgggtatttaaaaaatgcaccggggccagcccgagcgagttccgtgccggttgtgaagaaaaagtgaatgatgtagccgtcaagttgtcataa

SEQ ID NO: 99 - protein, 292 aa, Artificial Sequence
  A synthetic sequence
MAEAQNDPLLPGYSFNAHLVAGLTPIEANGYLDFFIDRPLGMKGYILNLTIRGQGVVKNQGREFVCRPGDILLFPPGEIHHYGRHPEAREWYHQWVYFRPRAYWHEWLNWPSIFANTGFFRPDEAHQPHFSDLFGQIINAGQGEGRYSELLAINLLEQLLLRRMEAINESLHPPMDNRVREACQYISDHLADSNFDIASVAQHVCLSPSRLSHLFRQQLGISVLSWREDQRISQAKLLLSTTRMPIATVGRNVGFDDQLYFSRVFKKCTGASPSEFRAGCEEKVNDVAVKLS

SEQ ID NO: 100 - DNA, 2558 bp, Homo sapiens
aaatgggagggggagacgcaagatggcggcagccgcgaactccggctctagcctcccgctgttcgactgcccaacctggtgagtggcggggcggccagggctagagtggcccggccggagctagcctgggctggaagggcggctctttttttacttttctgctgcgagccgaacggctcagaaaccccggaatggttgaggaaaaactgtttgctgcaccgggccgggcgacgtgttgaagaaccgagagcctggagcccaggcccaggaactgaagaaacccggggttgggggctcaaaggcgctcacttaggcagcccctttgagcgattagccagtcgccggagcgcttcgaggccttggcccgaacttacgcccaactcttgactgagtgcctggtgctctcgtggagcatcgcatctggccccttcctgtacgtcccgagcgcgctcgagccagccccggccccaaccctacctccaagccccgcatccctctgtggttgctgcatccctcgtgcggcacttgtctgtctgccacagagaatacgaggggcaggtaagccccctcccggtttacatctggatgtagtcaaaggagacaaactaattgagaaactgattattgatgagaagaagtattacttatttgggagaaaccctgatttgtgtgactttaccattgaccaccagtcttgctctcgggtccatgctgcacttgtctaccacaagcatctgaagagagttttcctgatagatctcaacagtaaacctgacagagttcaacactgcccacaacaagcggatttctacccttaccattgaggagggaaatctggacattcaaagaccaaagaggaagaggaagaactcacgggtgacattcagtgaggatgatgagatcatcaacccagaggatgtggatccctcagttggtcgattcaggaacatggtgcaaactgcagtggtcccagtcaagaagaagcgtgtggagggccctggctccctgggcctggaggaatcagggagcaggcgcatgcagaactttgccttcagcggaggactctacgggggcctgccccccacacacagtgaagcaggctcccagccacatggcatccatgggacagcactcatcggtggcttgcccatgccatacccaaaccttgcccctgatgtggacttgactcctgttgtgccgtcagcagtgaacatgaaccctgcaccaaaccctgcagtctataaccctgaagctgtaaatgaacccaagaagaagaaatatgcaaaagaggcttggccaggcaagaagcccacaccttccttgctgatttgatatttttggtcatggagaagggtgggattgggtgggaatggggtggaagggtgatggggagctaatgaactagggagaaaaactttccatgtgtgcggtatcgtctttcagaatgtctcctggcatcctaaccatgtaatatgacaattgggggtggggttgaaatagcccataaagacctgtcttcacaacacttgcattgtagagaaaggcttcttatatccttttcaatagactgccctggctctttcctaggccttccactacctcctttctttctcccactttctaggatcatttttatgtaaagtcacatatcccaggccctcaggttgaatccagagctgtagaggttacagtagcatcaccagccttgggggtccagagcctaatttatattcactatccttccaagtcccgggtagcagaagggttgccatagatctcagtttgatcaaaaagaaggcttagaattctgcagttaagctgaggtttaaactaaaaaatgtttccttgggtcagtggttttgaggtccagtagctaggcttttctcttttgtccttcctgttggaatgaaaacatttcgattttccttcatctgtgactggtgccatagacacaggtttatagttttaacttacagtattgtttgaaatttacctgtttttcttgtcaaacctgagcactcctcctgctgaagtttcttatttaattccagagtactgtcctctactctaaggcattacttttaagtgtattatgaaggcagttttcaaaggatatgaccagttggggtaattcaaattaaaaaggaaaagatttgtttggaagtaactggtgtctctaagaggaatttttagatgtcagtttggaggctctttcccccctcaattgagagctcttgttattcagagctccaagactagacctggctaacaaacataggagacaaagttaggaaacattgatacaagctttgtacagagatttgtacatttgtgtaataggccttttcatgctttatgtgtagctttttacctgtaacctttattacattgtaaattaaacgtaacttttgtcatttgggtgcaggctgtgaatttgtctctcagtcactgattgccactgccatctggaaatgtttgctaaaggcacagtcactgggcttgggaggcaatgctccatccccattatattacaaataaagatgccctaaatgagtgtg

SEQ ID NO: 101 - DNA, 2723 bp, Homo sapiens
ggcggcgcttgattgggctgggggggccaaataaaagcgatggcgattgggctgccgcgtttggcgctcggtccggtcgcgtccgacacccggtgggactcagaaggcagtggagccccggcggcggcggcggcggcgcgcgggggcgacgcgcgggaacaacgcgagtcggcgcgcgggacgaagaataatcatgggccagactgggaagaaatctgagaagggaccagtttgttggcggaagcgtgtaaaatcagagtacatgcgactgagacagctcaagaggttcagacgagctgatgaagtaaagagtatgtttagttccaatcgtcagaaaattttggaaagaacggaaatcttaaaccaagaatggaaacagcgaaggatacagcctgtgcacatcctgacttctgtgagctcattgcgcgggactagggagtgttcggtgaccagtgacttggattttccaacacaagtcatcccattaaagactctgaatgcagttgcttcagtacccataatgtattcttggtctcccctacagcagaattttatggtggaagatgaaactgttttacataacattccttatatgggagatgaagttttagatcaggatggtactttcattgaagaactaataaaaaattatgatgggaaagtacacggggatagagaatgtgggtttataaatgatgaaatttttgtggagttggtgaatgcccttggtcaatataatgatgatgacgatgatgatgatggagacgatcctgaagaaagagaagaaaagcagaaagatctggaggatcaccgagatgataaagaaagccgcccacctcggaaatttccttctgataaaatttttgaagccatttcctcaatgtttccagataagggcacagcagaagaactaaaggaaaaatataaagaactcaccgaacagcagctcccaggcgcacttcctcctgaatgtacccccaacatagatggaccaaatgctaaatctgttcagagagagcaaagcttacactcctttcatacgcttttctgtaggcgatgttttaaatatgactgcttcctacatcgtaagtgcaattattcttttcatgcaacacccaacacttataagcggaagaacacagaaacagctctagacaacaaaccttgtggaccacagtgttaccagcatttggagggagcaaaggagtttgctgctgctctcaccgctgagcggataaagaccccaccaaaacgtccaggaggccgcagaagaggacggcttcccaataacagtagcaggcccagcacccccaccattaatgtgctggaatcaaaggatacagacagtgatagggaagcagggactgaaacggggggagagaacaatgataaagaagaagaagagaagaaagatgaaacttcgagctcctctgaagcaaattctcggtgtcaaacaccaataaagatgaagccaaatattgaacctcctgagaatgtggagtggagtggtgctgaagcctcaatgtttagagtcctcattggcacttactatgacaatttctgtgccattgctaggttaattgggaccaaaacatgtagacaggtgtatgagtttagagtcaaagaatctagcatcatagctccagctcccgctgaggatgtggatactcctccaaggaaaaagaagaggaaacaccggttgtgggctgcacactgcagaaagatacagctgaaaaaggacggctcctctaaccatgtttacaactatcaaccctgtgatcatccacggcagccttgtgacagttcgtgcccttgtgtgatagcacaaaatttttgtgaaaagttttgtcaatgtagttcagagtgtcaaaaccgctttccgggatgccgctgcaaagcacagtgcaacaccaagcagtgcccgtgctacctggctgtccgagagtgtgaccctgacctctgtcttacttgtggagccgctgaccattgggacagtaaaaatgtgtcctgcaagaactgcagtattcagcggggctccaaaaagcatctattgctggcaccatctgacgtggcaggctgggggatttttatcaaagatcctgtgcagaaaaatgaattcatctcagaatactgtggagagattatttctcaagatgaagctgacagaagagggaaagtgtatgataaatacatgtgcagctttctgttcaacttgaacaatgattttgtggtggatgcaacccgcaagggtaacaaaattcgttttgcaaatcattcggtaaatccaaactgctatgcaaaagttatgatggttaacggtgatcacaggataggtatttttgccaagagagccatccagactggcgaagagctgttttttgattacagatacagccaggctgatgccctgaagtatgtcggcatcgaaagagaaatggaaatcccttgacatctgctacctcctcccccctcctctgaaacagctgccttagcttcaggaacctcgagtactgtgggcaatttagaaaaagaacatgcagtttgaaattctgaatttgcaaagtactgtaagaataatttatagtaatgagtttaaaaatcaactttttattgccttctcaccagctgcaaagtgttttgtaccagtgaatttttgcaataatgcagtatggtacatttttcaactttgaataaagaatacttgaacttgtccttgttgaatc

SEQ ID NO: 102 - DNA, 1488 bp, Homo sapiens
gcggggccgcgggccgggggcggactggggcgggcggaaggagagccaggccggaaggaggctgccggagggcgggaggcaggagcgggccaggagctgctgggctggagcggcggcgccgccatgtccgacagcgagaagctcaacctggactcgatcatcgggcgcctgctggaagtgcagggctcgcggcctggcaagaatgtacagctgacagagaacgagatccgcggtctgtgcctgaaatcccgggagatttttctgagccagcccattcttctggagctggaggcacccctcaagatctgcggtgacatacacggccagtactacgaccttctgcgactatttgagtatggcggtttccctcccgagagcaactacctctttctgggggactatgtggacaggggcaagcagtccttggagaccatctgcctgctgctggcctataagatcaagtaccccgagaacttcttcctgctccgtgggaaccacgagtgtgccagcatcaaccgcatctatggtttctacgatgagtgcaagagacgctacaacatcaaactgtggaaaaccttcactgactgcttcaactgcctgcccatcgcggccatagtggacgaaaagatcttctgctgccacggaggcctgtccccggacctgcagtctatggagcagattcggcggatcatgcggcccacagatgtgcctgaccagggcctgctgtgtgacctgctgtggtctgaccctgacaaggacgtgcagggctggggcgagaacgaccgtggcgtctcttttacctttggagccgaggtggtggccaagttcctccacaagcacgacttggacctcatctgccgagcacaccaggtggtagaagacggctacgagttctttgccaagcggcagctggtgacacttttctcagctcccaactactgtggcgagtttgacaatgctggcgccatgatgagtgtggacgagaccctcatgtgctctttccagatcctcaagcccgccgacaagaacaaggggaagtacgggcagttcagtggcctgaaccctggaggccgacccatcaccccaccccgcaattccgccaaagccaagaaatagcccccgcacaccaccctgtgccccagatgatggattgattgtacagaaatcatgctgccatgctgggggggggtcaccccgacccctcaggcccacctgtcacggggaacatggagccttggtgtatttttcttttctttttttaatgaatcaatagcagcgtccagtcccccagggctgcttcctgcctgcacctgcggtgactgtgagcaggatcctggggccgaggctgcagctcagggcaacggcaggccaggtcgtgggtctccagccgtgcttggcctcagggctggcagccggatcctggggcaacccatctggtctcttgaataaaggtcaaagctggattctcgcaaaaaaaaaaaaaaaaaa

SEQ ID NO: 103 - DNA, 4786 bp, Homo sapiens
gctgcgtgacgcggcggcgcgcaagggacgtgcggagtgagtggcgctgcgggtggggccgtcggcggcgctggtgagagaacgccgagccgtcgccgcagcctccgccgccgagaagcccttgttcccgctgctgggaaggagagtctgtgccgacaagatggcggacggggagctgaacgtggacagcctcatcacccggctgctggaggtacgaggatgtcgtccaggaaagattgtgcagatgactgaagcagaagttcgaggcttatgtatcaagtctcgggagatctttctcagccagcctattcttttggaattggaagcaccgctgaaaatttgtggagatattcatggacaatatacagatttactgagattatttgaatatggaggtttcccaccagaagccaactatcttttcttaggagattatgtggacagaggaaagcagtctttggaaaccatttgtttgctattggcttataaaatcaaatatccagagaacttctttctcttaagaggaaaccatgagtgtgctagcatcaatcgcatttatggattctatgatgaatgcaaacgaagatttaatattaaattgtggaagaccttcactgattgttttaactgtctgcctatagcagccattgtggatgagaagatcttctgttgtcatggaggattgtcaccagacctgcaatctatggagcagattcggagaattatgagacctactgatgtccctgatacaggtttgctctgtgatttgctatggtctgatccagataaggatgtgcaaggctggggagaaaatgatcgtggtgtttcctttacttttggagctgatgtagtcagtaaatttctgaatcgtcatgatttagatttgatttgtcgagctcatcaggtggtggaagatggatatgaattttttgctaaacgacagttggtaaccttattttcagccccaaattactgtggcgagtttgataatgctggtggaatgatgagtgtggatgaaactttgatgtgttcatttcagatattgaaaccatctgaaaagaaagctaaataccagtatggtggactgaattctggacgtcctgtcactccacctcgaacagctaatccgccgaagaaaaggtgaagaaaggaattctgtaaagaaaccatcagatttgttaaggacatacttcataatatataagtgtgcactgtaaaaccatccagccatttgacaccctttatgatgtcacacctttaacttaaggagacgggtaaaggatcttaaatttttttctaatagaaagatgtgctacactgtattgtaataagtatactctgttatagtcaacaaagttaaatccaaattcaaaattatccattaaagttacatcttcatgtatcacaatttttaaagttgaaaagcatcccagttaaactagatgtgatagttaaaccagatgaaagcatgatgatccatctgtgtaatgtggttttagtgttgcttggttgtttaattattttgagcttgttttgtttttgtttgttttcactagaataatggcaaatacttctaatttttttccctaaacatttttaaaagtgaaatatgggaagagctttacagacattcaccaactattattttcccttgtttatctacttagatatctgtttaatcttactaagaaaactttcgcctcattacattaaaaaggaattttagagattgattgttttaaaaaaaaatacgcacattgtccaatccagtgattttaatcatacagtttgactgggcaaactttacagctgatagtgaatattttgctttatacaggaattgacactgatttggatttgtgcactctaatttttaacttattgatgctctattgtgcagtagcatttcatttaagataaggctcatatagtattacccaactagttggtaatgtgattatgtggtaccttggctttaggttttcattcgcacggaacaccttttggcatgcttaacttcctggtaacaccttcacctgcattggttttctttttcttttttctttctttttttttttttttttttttttgagttgttgtttgtttttagatccacagtacatgagaatccttttttgacaagccttggaaagctgacactgtctctttttcctccctctatacgaaggatgtatttaaatgaatgctggtcagtgggacattttgtcaactatgggtattgggtgcttaactgtctaatattgccatgtgaatgttgtatacgattgtaaggcttatgtcactaaagatttttattctgattttttcataatcaaaggtcatatgatactgtatagacaagctttgtagtgaagtatagtagcaataatttctgtacctgatcaagtttattgcagcctttcttttcctatttcttttttttaagggttagtattaacaaatggcaatgagtagaaaagttaacatgaagattttagaaggagagaacttacaggacacagatttgtgattctttgactgtgacactattggatgtgattctaaaagcttttattgagcattgtcaaatttgtaagcttcatagggatggacatcatatctataatgcccttctatatgtgctaccatagatgtgacatttttgaccttaatatcgtctttgaaaatgttaaattgagaaacctgttaacttacattttatgaattggcacattgtattacttactgcaagagatatttcattttcagcacagtgcaaaagttctttaaaatgcatatgtctttttttctaattccgttttgttttaaagcacattttaaatgtagttttctcatttagtaaaagttgtctaattgatatgaagcctgactgattttttttttccttacagtgagacatttaagcacacattttattcacatagatactatgtccttgacatattgaaatgattcttttctgaaagtattcatgatctgcatatgatgtattaggttaggtcacaaaggttttatctgaggtgatttaaataacttcctgattggagtgtgtaagctgagcgatttctaataaaattttagttgtacacttttagtagtcatagtgaagcaggtctagaaaataagcctttggcagggaaaaagggcaatgttgattaatctcagtattaaaccacattaatctgtatcccattgtctggcttttgtaaattcatccaggtcaagactaagtatgttggttaataggaatccttttttttttttttaaagactaaatgtgaaaaaataatcactacttaagctaattaatattggtcattaaatttaaaggatggaaatttatcatgtttaaaaattattcaagcactcttaaaaccacttaaacagcctccagtcataaaaatgtgttctttacaaatatttgcttggcaacacgacttgaaataaataaaactttgtttcttaggagaaaatgattctgtaattccagtgtcactaatttatattgttctttcctctgatttttttcaggttagtgatttttttgtatacaatttaatccaaatgttatgacattcagaaatcatgaaacacagtagatatctgttataatgtggtgtatcacatggattataaagcaaagttatggtcgatttctattcttgaaagaatcaactacagtgaatcctttgcatttgaagccttaacatgcattgctttaattttgcccagggacaaattttaataatcagcaagactggtttgtgcaaagcgttgagtcatcaggtatttagagcctagccagctacccagtatccatgctgccatatcccttcattgtaaaaagtacctaaacattcgtgaaatgattttttttagctgaaaaatgctggcaagaagaattttaaagcttaaaataggtggtaaatttgaagtatgagtgtgttcacgagaaacataggcttttcaaaaaaatttttattcaaggcaaagcaaggaacatcttgagatatgtctcaagaatataaagatgtattattttaagccaaggagctgaaatatatctcagtttataaattcaggtatattctttttgtctccatggcaaccataacttttgaaccaaaaaaaattgtttttacatctttatgctgaaaatgtgtttagattaggaatatggtcgggctgaatttgctgttgctccctaaccaaatccacctcttgttttccttgtgagtccatggctaaatcaaagctgcccctgagaagagacttaatccaagcctgattgtactagtggcatcacttagaagtaggctttccctcttcctagtagatctcaatgttttataattccttaaaacagctgaaaattgggacaacatactttacgcaatgaacagtagttaaataggaaataaactagttccatataagtatacacctagagttttaattacctttataatgtttcttaaaagtgaaacttagatacaattgtgattggatacttagatactaagtgaaacttagtgtaacaattttgatctgttaaattggattttacatgtacatttgaatgccagaatttctaaataaatcccctggttaggaaattttaaaagtcaaagcttgttttcttcaaccactaccttctacattggttgacttagaccgtaagctttttaagtttctcattgtaatttaccttctcatgcagattgctgatgttttattaaaccttatttttacaaaaatgaaaaaa

SEQ ID NO: 104 - DNA, 2526 bp, Homo sapiens
taaagaagtcccggccgggccgctgcactccccgcgcgcatccgtgcgccgcccgaggctgtctaaggagtcggcggccattttgttcttctcgtggttccagtggggagagaaggaggaagtagggagcggggtggcaggggggggacccgccgcggctgctgccaccgccgccaccaccgcctctgctcgtggcgtgggaaaggaggtgtgagtcccgggcgcgagccggcggcggcgccgctgcgggagggtcggcggtgggaaggcgatggcggatttagataaactcaacatcgacagcattatccaacggctgctggaagtgagagggtccaagcctggtaagaatgtccagcttcaggagaatgaaatcagaggactgtgcttaaagtctcgtgaaatctttctcagtcagcctatcctactagaacttgaagcaccactcaaaatatgtggtgacatccatggacaatactatgatttgctgcgactttttgagtacggtggtttcccaccagaaagcaactacctgtttcttggggactatgtggacaggggaaagcagtcattggagacgatctgcctcttactggcctacaaaataaaatatcctgagaatttttttcttctcagagggaaccatgaatgtgccagcatcaacagaatttatggattttatgatgaatgtaaaagaagatacaacattaaactatggaaaactttcacagactgttttaactgtttaccgatagcagccatcgtggatgagaagatattctgctgtcatggaggtttatcaccagatcttcaatctatggagcagattcggcgaattatgcgaccaactgatgtaccagatcaaggtcttctttgtgatcttttgtggtctgaccccgataaagatgtcttaggctggggtgaaaatgacagaggagtgtccttcacatttggtgcagaagtggttgcaaaatttctccataagcatgatttggatcttatatgtagagcccatcaggtggttgaagatggatatgaattttttgcaaagaggcagttggtcactctgttttctgcgcccaattattgcggagagtttgacaatgcaggtgccatgatgagtgtggatgaaacactaatgtgttcttttcagattttaaagcctgcagagaaaaagaagccaaatgccacgagacctgtaacgcctccaaggggtatgatcacaaagcaagcaaagaaatagatgtcgttttgacactgcctagtcgggacttgtaacatagagtatataaccttcatttttaagactgtaatgtgtactggtcagcttgctcagatagatctgtgtttgtgggggcccttccttccatttttgatttagtgaatggcatttgctggttataacagcaaatgaaagactcttcactccaaaaagaaaagtgttttgttttttaattctctgttccttttgcaaacaattttaatgatggtgttaaagctgtacaccccaggacagtttatcctgtctgaggagtaagtgtacaattgatcttttttaattcagtacaacccataatcatgtaaatgctcattttctttaggacataaagagagccctagggtgctctgaatctgtacatgttcttgtcataaaatgcatactgttgatacaaaccactgtgaacattttttatttgagaattttgtttcaaagggattgctttttcctctcattgtcttgttatgtacaaactagtttttatagctatcaacattaggagtaactttcaaccttgccagcatcactggtatgatgtatatttaattaaagcacacttttccccgaccgtatacttaaaatgacaaagccattcttttaaatatttgtgactctttcctaaagccaaagtttctgttgaattatgttttgacacacccctaagtacaaggtggtatggttgtatacacatgctgccttcttggggattcaaaaacaggtttttgattttgaatagcaattagtgatatagtgctgtttaagctactaacgataaaaggtaataacattttatacaatttccatatagtctattcattaagtaatctttttacagttgcatcaggcctgaacccgtccattcagaaagcttcaaattatagaaacaatactgttctatacgagtgaccgattatgctttctttggcctacattctttattctgcggtgaagttgaggcttataagttaaaacaaaggaactaacttactgtccaccagtttatacagaactcacagtacctatgacttttttaaactaagatctgttaaaaaagaaatctgtttcaacagatgaccgtgtacaataccgtgtggtgaaaatgaattcagacttattaaatgatgaacttgttaaatcttctcagtgtctatttatcagcacaatacacacaggagaactgttgatggcatattgaatagattttcctgaataaattgctctggaaaccacacaaaaaaaaaaaaaaa

SEQ ID NO: 105 - DNA, 4477 bp, Homo sapiens
ggtgagcggcctccgaagcggagcggggctctgaggagacactttttttttcctccctccttccctcctctcctcctcccttcccttcccctctcctcccctctctcctccttcccccctcggtccgccggagcctgctggggcgagcggttggtattgcaggcgcttgctctccggggccgcccggcgggtagctggcggggggaggaggcaggaaccgcgatggcgcctcagaagcacggcggtgggggagggggcggctcggggcccagcgcggggtccgggggaggcggcttcgggggttcggcggcggtggcggcggcgacggcttcgggcggcaaatccggcggcgggagctgtggagggggtggcagttactcggcctcctcctcctcctccgcggcggcagcggcgggggctgcggtgttaccggtgaagaagccgaaaatggagcacgtccaggctgaccacgagcttttcctccaggcctttgagaagccaacacagatctatagatttcttcgaactcggaatctcatagcaccaatatttttgcacagaactcttacttacatgtctcatcgaaactccagaacaaacatcaaaaggaaaacatttaaagttgatgatatgttatcaaaagtagagaaaatgaaaggagagcaagaatctcatagcttgtcagctcatttgcagcttacgtttactggtttcttccacaaaaatgataagccatcaccaaactcagaaaatgaacaaaattctgttaccctggaagtcctgcttgtgaaagtttgccacaaaaaaagaaaggatgtaagttgtccaataaggcaagttcccacaggtaaaaagcaggtgcctttgaatcctgacctcaatcaaacaaaacccggaaatttcccgtcccttgcagtttccagtaatgaatttgaacctagtaacagccatatggtgaagtcttactcgttgctatttagagtgactcgtccaggaagaagagagtttaatggaatgattaatggagaaaccaatgaaaatattgatgtcaatgaagagcttccagccagaagaaaacgaaatcgtgaggatggggaaaagacatttgttgcacaaatgacagtatttgataaaaacaggcgcttacagcttttagatggggaatatgaagtagccatgcaggaaatggaagaatgtccaataagcaagaaaagagcaacatgggagactattcttgatgggaagaggctgcctccattcgaaacattttctcagggacctacgttgcagttcactcttcgttggacaggagagaccaatgataaatctacggctcctattgccaaacctcttgccactagaaattcagagagtctccatcaggaaaacaagcctggttcagttaaacctactcaaactattgctgttaaagaatcattgactacagatctacaaacaagaaaagaaaaggatactccaaatgaaaaccgacaaaaattaagaatattttatcagtttctctataacaacaatacaaggcaacaaactgaagcaagagatgacctgcattgcccttggtgtactctgaactgccgcaaactttatagtttactcaagcatcttaaactctgccatagcagatttatcttcaactatgtttatcatccaaaaggtgctaggatagatgtttctatcaatgagtgttatgatggctcctatgcaggaaatcctcaggatattcatcgccaacctggatttgcttttagtcgcaacggaccagttaagagaacacctatcacacatattcttgtgtgcaggccaaaacgaacaaaagcaagcatgtctgaatttcttgaatctgaagatggggaagtagaacagcaaagaacatatagtagtggccacaatcgtctgtatttccatagtgatacctgcttacctctccgtccacaagaaatggaagtagatagtgaagatgaaaaggatcctgaatggctaagagaaaaaaccattacacaaattgaagagttttctgatgttaatgaaggagagaaagaagtgatgaaactctggaatctccatgtcatgaagcatgggtttattgctgacaatcaaatgaatcatgcctgtatgctgtttgtagaaaattatggacagaaaataattaagaagaatttatgtcgaaacttcatgcttcatctagtcagcatgcatgactttaatcttattagcataatgtcaatagataaagctgttaccaagctccgtgaaatgcagcaaaaattagaaaagggggaatctgcttcccctgcaaacgaagaaataactgaagaacaaaatgggacagcaaatggatttagtgaaattaactcaaaagagaaagctttggaaacagatagtgtctcaggggtttcaaaacagagcaaaaaacaaaaactctgaaaagctctaaccccatgttatggacaaacactgaaattacattttagggaattcatcctctaagaattatgtttttgtttttaatcatatgttccaaacaggcactgttagatgaagtaaatgatttcaacaaggatatttgtatcagggttctacttcacttcattatgcagcattacatgtatatcacttttattgatgtcattaaaacattctgtactttaagcatgaaaagcaatatttcaaagtatttttaaactcaacaaatgtcatcaaatatgttgaattgatctagaaattatttcatatataaatcagaatttttttgcatttatgaacggctgtttttctactttgtaattgtgagacattttcttggggagggaaaattggaatggttcccttttttagaaattgaagtggtcttcatatgtcaactacagaaaaggaaaaaaatagaaattgaaggatttttatgaaattatattgcattactatttgcagtcaaactttgatccttgtttttgaaatcatttgtcaattcggaatgaaaaattataatgtaattttacattacataagttccttttacaattaaaaaatagcacttcttcatcttatgcctgtttgagaagatattaaattttcacattgttgacagtgaaatgctatgttggtttataagattacagaccatttgttttcatgtggataattttagtgcattgctcacccggtatgttttttttttttaacttgaacattttgcttgttttgtttttcttttttaattagataatcacacggaaaattaagctgttcatatctttaaattaggattgcaaaccaaggaaagaacgcatttgagattttaagatgtcacttataaggggagaagtgttcttaaaaagtcaaccagaaaactgttatgccttttatttgtttgcaaggatgtctttgtaatgtgtttcatgaatagaatatccaatagagataagctgacttgaatcattttgagcaattttgccctgtgttatatgtgtttcacgcacatatttgcagttggattttctccaacagaaagtggattcactactggcacattaacaagcaccaataggtttttattccaactccgagcactgtggttgagtaacatcacctcaattttttattatccttaaagatattgcattttcatattctttatttataaaggatcaatgctgctgtaaatacaggtatttttaattttaaaatttcattccaccaccatcagatgcagttccctattttgtttaatgaagggatatataagctttctaatggtgtcttcagaaatttataaaatgtaaatactgatttgactggtctttaagatgtgtttaactgtgaggctatttaacgaatagtgtggatgtgatttgtcatccagtattaagttcttagtcattgatttttgtgtttaaaaaaaaataggaaagagggaaactgcagctttcattacagattccttgattggtaagctctccaaatgatgagttctagtaaactctgatttttgcctctggatagtagatctcgagcgtttatctcgggctttaatttgctaaagctgtgcacatatgtaaaaaaaaaaaaaaaaagattattttaggggagatgtaggtgtagaattattgcttatgtcatttcttaagcagttatgctcttaatgcttaaaagaaggctagcattgtttgcacaaaaagttggtgattcccaccccaaatagtaataaaattacttctgttgagtaaactttttatgtcatcgtaaaagctgaaaaaatccctttgtttctatttataaaaaaagtgcttttctatatgtacccttgataacagattttgaagaaatcctgtaagatgataaagcatttgaatggtacagtagatgtaaaaaaaattcagtttaaaagaacatttgtttttacattaaatgtttatttgaaatcaaatgattttgtacataaagttcaataatataaaagctg

SEQ ID NO: 106 - DNA, 2476 bp, Homo sapiens
cgctttgaaatccaccctgggattcggaaaccgggtagaaaactacctggttcagcaaacgagaattcaaacagaggaggggcttggaggaggcgggtttcgacgaacccagcgcaagagtacgccacggcgcctgcgcatcccctgacgggtactttccattcgccagatgggggaagccagggggaagcaggttactgtttttgcatttctatcttcaaggaagaattaggttatgaatagttccgtgaatagtcaggaagcgctgtcctccaagttcaagattaaggaaacgtggcatgcacagctaaagcaagaggtgacgtcttgtatcttcccccgtttcctgggacattggtggtgtagcccattccacagactttcgctccctagcagcgggtcggagatcgaaggaacgggccaattgcggctgaaacgtctttggaaggaggaagggggtgagggagcatccctttgagtttcgcctcttctcgaggcggtggtgggaagggagacatacttaatactgccctcttaatccaacggaccttacatcgtgtagactgccgggagggcggcgggaaaagggcaagacgggagttggggaagggaaggagccaggaagccgcgcgggagggcgcgcgcgcgcgcccctttttcagcagtgtggcggggtcgcacgcacgcccgcctcggcggctgggcgcgatttgcgacagtggggggggcggtggaggtggcggcggcagcggcaactttgcggcaagctcgggccgggcttgcttgacggcggtgtggcggaggccccgccccaggcggcaggaacctggagggaggcggaggaatatgtccgagagggaagtgtcgactgcgccggcgggaacagacatgcctgcggccaagaagcagaagctgagcagtgacgagaacagcaatccagacctctctggagacgagaatgatgacgctgtcagtatagaaagtggtacaaacactgaacgccctgatacacctacaaacacgccaaatgcacctggaaggaaaagttggggaaagggaaaatggaagtcaaagaaatgcaaatattctttcaaatgtgtaaatagtctcaaggaagatcataaccaaccattgtttggagttcagtttaactggcacagtaaagaaggagatccattagtgtttgcaactgtaggaagcaacagagttaccttgtatgaatgtcattcacaaggagaaatccggttgttgcaatcttacgtggatgctgatgctgatgaaaacttttacacttgtgcatggacctatgatagcaatacgagccatcctctgctggctgtagctggatctagaggcataattaggataataaatcctataacaatgcagtgtataaagcactatgttggccatggaaatgctatcaatgagctgaaattccatccaagagatccaaatcttctcctgtcagtaagtaaagatcatgctttacgattatggaatatccagacggacactctggtggcaatatttggaggcgtagaagggcacagagatgaagttctaagtgctgattatgatcttttgggtgaaaaaataatgtcctgtggtatggatcattctcttaaactttggaggatcaattcaaagagaatgatgaatgcaattaaggaatcttatgattataatccaaataaaactaacaggccatttatttctcagaaaatccattttcctgatttttctaccagagacatacataggaattatgttgattgtgtgcgatggttaggcgatttgatactttctaagtcttgtgaaaatgccattgtgtgctggaaacctggcaagatggaagatgatatagataaaattaaacccagtgaatctaatgtgactattcttgggcgatttgattacagccagtgtgacatttggtacatgaggttttctatggatttctggcaaaagatgcttgcattgggcaatcaagttggcaaactttatgtttgggatttagaagtagaagatcctcataaagccaaatgtacaacactgactcatcataaatgtggtgctgctattcgacaaaccagttttagcagggatagcagcattcttatagctgtttgtgatgatgccagtatttggcgctgggatcgacttcgataaaatacttttgcctaatcaaaattagagtgtgtttgttgtctgtgtaaaatagaattaatgtatcttgctagtaagggcacgtagagcatttagagttgtctttcagcattcaatcaggctgagctgaatgtagtgatgtttacattgtttacattctttgtactgtcttcctgctcagactctactgcttttaataaaaatttatttttgtaaagctgtgtgtttagttactttcattgtggtgaaaaaaagttaaaagtaataaaattatgccttatctttttaaaaaaaaaaaaaaaaaaaa

SEQ ID NO: 107 - DNA, 4654 bp, Homo sapiens
gcgcatgcgtcctagcagcgggacccgcggctcgggatggaggctggacacctgttctgctgttgtgtcctgccattctcctgaagaacagaggcacactgtaaaacccaacacttccccttgcattctataagattacagcaagatggaaataccaaatccccctacctccaaatgtatcacttactggaaaagaaaagtgaaatctgaatacatgcgacttcgacaacttaaacggcttcaggcaaatatgggtgcaaaggctttgtatgtggcaaattttgcaaaggttcaagaaaaaacccagatcctcaatgaagaatggaagaagcttcgtgtccaacctgttcagtcaatgaagcctgtgagtggacacccttttctcaaaaagtgtaccatagagagcattttcccgggatttgcaagccaacatatgttaatgaggtcactgaacacagttgcattggttcccatcatgtattcctggtcccctctccaacagaactttatggtagaagatgagacggttttgtgcaatattccctacatgggagatgaagtgaaagaagaagatgagacttttattgaggagctgatcaataactatgatgggaaagtccatggtgaagaagagatgatccctggatccgttctgattagtgatgctgtttttctggagttggtcgatgccctgaatcagtactcagatgaggaggaggaagggcacaatgacacctcagatggaaagcaggatgacagcaaagaagatctgccagtaacaagaaagagaaagcgacatgctattgaaggcaacaaaaagagttccaagaaacagttcccaaatgacatgatcttcagtgcaattgcctcaatgttccctgagaatggtgtcccagatgacatgaaggagaggtatcgagaactaacagagatgtcagaccccaatgcacttccccctcagtgcacacccaacatcgatggccccaatgccaagtctgtgcagcgggagcaatctctgcactccttccacacacttttttgccggcgctgctttaaatacgactgcttccttcacccttttcatgccacccctaatgtatataaacgcaagaataaagaaatcaagattgaaccagaaccatgtggcacagactgcttccttttgctggaaggagcaaaggagtatgccatgctccacaacccccgctccaagtgctctggtcgtcgccggagaaggcaccacatagtcagtgcttcctgctccaatgcctcagcctctgctgtggctgagactaaagaaggagacagtgacagggacacaggcaatgactgggcctccagttcttcagaggctaactctcgctgtcagactcccacaaaacagaaggctagtccagccccacctcaactctgcgtagtggaagcaccctcggagcctgtggaatggactggggctgaagaatctctttttcgagtcttccatggcacctacttcaacaacttctgttcaatagccaggcttctggggaccaagacgtgcaagcaggtctttcagtttgcagtcaaagaatcacttatcctgaagctgccaacagatgagctcatgaacccctcacagaagaagaaaagaaagcacagattgtgggctgcacactgcaggaagattcagctgaagaaagataactcttccacacaagtgtacaactaccaaccctgcgaccacccagaccgcccctgtgacagcacctgcccctgcatcatgactcagaatttctgtgagaagttctgccagtgcaacccagactgtcagaatcgtttccctggctgtcgctgtaagacccagtgcaataccaagcaatgtccttgctatctggcagtgcgagaatgtgaccctgacctgtgtctcacctgtggggcctcagagcactgggactgcaaggtggtttcctgtaaaaactgcagcatccagcgtggacttaagaagcacctgctgctggccccctctgatgtggccggatggggcaccttcataaaggagtctgtgcagaagaacgaattcatttctgaatactgtggtgagctcatctctcaggatgaggctgatcgacgcggaaaggtctatgacaaatacatgtccagcttcctcttcaacctcaataatgattttgtagtggatgctactcggaaaggaaacaaaattcgatttgcaaatcattcagtgaatcccaactgttatgccaaagtggtcatggtgaatggagaccatcggattgggatctttgccaagagggcaattcaagctggcgaagagctcttctttgattacaggtacagccaagctgatgctctcaagtacgtggggatcgagagggagaccgacgtcctttagccctcccaggccccacggcagcacttatggtagcggcactgtcttggctttcgtgctcacaccactgctgctcgagtctcctgcactgtgtctcccacactgagaaaccccccaacccactccctctgtagtgaggcctctgccatgtccagagggcacaaaactgtctcaatgagaggggagacagaggcagctagggcttggtctcccaggacagagagttacagaaatgggagactgtttctctggcctcagaagaagcgagcacaggctggggtggatgacttatgcgtgatttcgtgtcggctccccaggctgtggcctcaggaatcaacttaggcagttcccaacaagcgctagcctgtaattgtagctttccacatcaagagtccttatgttattgggatgcaggcaaacctctgtggtcctaagacctggagaggacaggctaagtgaagtgtggtccctggagcctacaagtggtctgggttagaggcgagcctggcaggcagcacagactgaactcagaggtagacaggtcaccttactacctcctccctcgtggcagggctcaaactgaaagagtgtgggttctaagtacaggcattcaaggctgggggaaggaaagctacgccatccttccttagccagagagggagaaccagccagatgatagtagttaaactgctaagcttgggcccaggaggctttgagaaagccttctctgtgtactctggagatagatggagaagtgttttcagattcctgggaacagacaccagtgctccagctcctccaaagttctggcttagcagctgcaggcaagcattatgctgctattgaagaagcattaggggtatgcctggcaggtgtgagcatcctggctcgctggatttgtgggtgttttcaggccttccattccccatagaggcaaggcccaatggccagtgttgcttatcgcttcagggtaggtgggcacaggcttggactagagaggagaaagattggtgtaatctgctttcctgtctgtagtgcctgctgtttggaaagggtgagttagaatatgttccaaggttggtgaggggctaaattgcacgcgtttaggctggcaccccgtgtgcagggcacactggcagagggtatctgaagtgggagaagaagcaggtagaccacctgtcccaggctgtggtgccaccctctctggcattcatgcagagcaaagcactttaaccatttcttttaaaaggtctatagattggggtagagtttggcctaaggtctctagggtccctgcctaaatcccactcctgagggagggggaagaagagagggtgggagattctcctccagtcctgtctcatctcctgggagaggcagacgagtgagtttcacacagaagaatttcatgtgaatggggccagcaagagctgccctgtgtccatggtgggtgtgccgggctggctgggaacaaggagcagtatgttgagtagaaagggtgtgggcgggtatagattggcctgggagtgttacagtagggagcaggcttctcccttctttctgggactcagagccccgcttcttcccactccacttgttgtcccatgaaggaagaagtggggttcctcctgacccagctgcctcttacggtttggtatgggacatgcacacacactcacatgctctcactcaccacactggagggcacacacgtaccccgcacccagcaactcctgacagaaagctcctcccacccaaatgggccaggccccagcatgatcctgaaatctgcatccgccgtggtttgtattcattgtgcatatcagggataccctcaagctggactgtgggttccaaattactcatagaggagaaaaccagagaaagatgaagaggaggagttaggtctatttgaaatgccaggggctcgctgtgaggaataggtgaaaaaaaacttttcaccagcctttgagagactagactgaccccacccttccttcagtgagcagaatcactgtggtcagtctcctgtcccagcttcagttcatgaatactcctgttcctccagtttcccatcctttgtccctgctgtcccccacttttaaagatgggtctcaacccctccccaccacgtcatgatggatggggcaaggtggtggggactaggggagcctggtatacatgcggcttcattgccaataaatttcatgcactttaaagtcctgtggcttgtgacctcttaataaagtgttagaatccaaaaaaaaa

SEQ ID NO: 108 - DNA, 7943 bp, Homo sapiens
gctcccattggctgatgttggcgcgaaggtgcgcgagtcagccctcgcgctgggggcgcaggaaacaatagaggccgcgcgcacagagcgagctcttgcagcctccccgcccctcccgcaacgctcgaccccaggattcccccggctcgcctgcccgccatggccgacaaggaagcagccttcgacgacgcagtggaagaacgagtgatcaacgaggaatacaaaatatggaaaaagaacaccccttttctttatgatttggtgatgacccatgctctggagtggcccagcctaactgcccagtggcttccagatgtaaccagaccagaagggaaagatttcagcattcatcgacttgtcctggggacacacacatcggatgaacaaaaccatcttgttatagccagtgtgcagctccctaatgatgatgctcagtttgatgcgtcacactacgacagtgagaaaggagaatttggaggttttggttcagttagtggaaaaattgaaatagaaatcaagatcaaccatgaaggagaagtaaacagggcccgttatatgccccagaacccttgtatcatcgcaacaaagactccttccagtgatgttcttgtttttgactatacaaaacatccttctaaaccagatccttctggagagtgcaacccagacttgcgtctccgtggacatcagaaggaaggctatgggctttcttggaacccaaatctcagtgggcacttacttagtgcttcagatgaccataccatctgcctgtgggacatcagtgccgttccaaaggagggaaaagtggtagatgcgaagaccatctttacagggcatacggcagtagtagaagatgtttcctggcatctactccatgagtctctgtttgggtcagttgctgatgatcagaaacttatgatttgggatactcgttcaaacaatacttccaaaccaagccactcagttgatgctcacactgctgaagtgaactgcctttctttcaatccttatagtgagttcattcttgccacaggatcagctgacaagactgttgccttgtgggatctgagaaatctgaaacttaagttgcattcctttgagtcacataaggatgaaatattccaggttcagtggtcacctcacaatgagactattttagcttccagtggtactgatcgcagactgaatgtctgggatttaagtaaaattggagaggaacaatccccagaagatgcagaagacgggccaccagagttgttgtttattcatggtggtcatactgccaagatatctgatttctcctggaatcccaatgaaccttgggtgatttgttctgtatcagaagacaatatcatgcaagtgtggcaaatggcagagaacatttataatgatgaagaccctgaaggaagcgtggatccagaaggacaagggtcctagatatgtctttacttgttgtgattttagactccccttttttcttctcaaccctgagagtgatttaacactggttttgagacagactttattcagctatccctctatataataggtaccaccgataatgctattagcccaaaccgtgggtgttttctaaatattaataggggggcttgattcaacaaagccacagacttaacgttgaaattttcttcaggaattttctagtaacccaggtctaaagtagctacagaaaggggaatattatgtgtgattatttttcttcttatgctatatccccaagtttttcagactcatttaagtaaaggctagagtgagtaaggaatagagccaaatgaggtaggtgtctgagccatgaagtataaatactgaaagatgtcacttttattcaggaaatagggggagattcaagtcatatagattcctactcgaaaatcttgacacctgactttccaggatgcacattttcatacgtagaccagtttcctcttggtttcttcagttaagtcaaaacaacacgttcctctttccccatatattcatatatttttgctcgttagtgtatttcttgagctgttttcatgttgtttatttcctgtctgtgaaatggtgtttttttttttgttgttggtttttttttttttttttttaacttgggaccaccaagttgtaaagatgtatgtttttacctgacagttataccacaggtagactgtcaagttgagaagagtgaatcaataacttgtatttgttttaaaaattaaattaatccttgataagagttgctttttttttttaggagttagtccttgaccactagtttgatgccatctccattttgggtgacctgtttcaccagcaggcctgttactctccatgactaactgtgtaagtgcttaaaatggaataaattgcttttctacataaccccatgctgatgggttttatttagtataaaacatccatcaaacaccagtctctggcttctagaagagtccttcagatgacagttgttgtccatggtctttgactatcaagagcagaattaaatgtaatagtcccagagctgtagaaaagaactttactccttcccagggaaagtgaaagacataaaacactgaatcagaggtggcacagattagtctttgataaggtaacgtttctttgaagtctatctgtagagaactacatggacttccaagagtgtcaaaggcagtgtggtagagagaatttaaggcaagatttaaatttggaaaaggtgcttgaaccttttctcagaggttttatttccccagtatgtttttcactggggcctttacttaggttagaaataataggctttgaaggcctctatcaccagatgcaataaccagataaaattcctgttttttcccaatcgcttagttttttgttgttgttgttttttaactgagtagatcattctgacccagaactactttcatgaggtaagatctttgggaaaatctgaatagcgttaaccattagattcaaatctcaaatggtttcttttcaagtctagttgttttagagtatagtgagaaataccttgacacaattttaagagtaaactatatgggtcagcatatccttgaacaaaaagtagactttgtaaaagtattcatttaaattctaacactcgtggcacaaaagaatggaaattgtaaacccatgtaatggaaattggctatctttttgaccccacatgtgcccctcaaaaatgtttttggtttgggtcaacacaaggcaagatacattctttaaaatactcccagatgtgtccatacattcatccttcactcagtgcatatgtgagggttgttgctggaagacaggaggctcatctttcctttccttggtgcattgagatcagtatcaacagcagatgaaatagaatccagcaaagagttgacatgttctgcctccggccaactctagaatctttttaagcaggtcagccagtatttgcaacttccacaggatgaattgcttgccaagtttctggcactcttgtctggttggaagagtacatccaaagggtacttagtgatcctttgctaagaagttttttgctgtttccgggttacagatttggccatatatttctaaacagcccctgtaaagttgaaagaaaaagtttataacagtgaacttctgaggtttagttactgcaggctttgttgagaagagattgttacagtgtgatttatggatgatcagggatgactttcccctagcaaatatttggatgcctcctgtttgtcaaatagaatgaatggtgatggtgatgggagggatagttaaacgttttctctgctaggttaacttcttacaggtataattacaatgcctgaaattctgtagtttcatttctttggattagtcgttgtcttttccagattgtacacaatctgatcaacacaaaggtagttagtagatcattaacctcaattgcaaggttataatttctcaaacattaagcatattatcagtcatgtggattcaaacacagtataagaaaatcctcaaggctgggtgtgatggcttatgcctgtaatcccagctacttagcaggctgaggcaggagtattgtttgaacccaggaggcagagttgcagtgagccaagatcgtgccactactccagcctgggcaaaatagcaagacccgaccccccatctctactaaaaagaaatttaaaaaaataaaatcctagaaaattagaaaaagcaacaatagttacttgtgggccaggcgcggtggttcacgcctgtaatcccagcactttgagaggctgaggcacgtggatcacaaggtcaggagttcaagaccagcctggccaagatggtgaaaccccgtttctactaaaaatacaaaaactagctggccgtggtggcatgctcctgtagtcccagctactcaggaggctgaggcaggaaaatcacttgaacccaggaggtggaggttgcagtgaactgagaccgtgccactgcactccagcctgggtggcagagcgagactgtctcaaaaaaaaaagaaagttgtgaatttgatgtaagcttaggaaatgaataaaatttataggcatctgtataatgtacaacttgacacggactttcttttatccttagtttctttcacggactctagaacttttatcagaatatactggtaaaacattgggggagggatcctgagtaggtgattggtcagaaagatgccttcagttttgtcagtgtctaaaagttaagtctgtttaggccaagcatggtggctcacacctgaaatcccagcactctgggaggccgaggcaagtggatcacaaggtcaggagatgagaccatcttagccaacatggtgaaaccccgtctctactaaaatacaaaaaaattagccaggcgtggtggtgcgtgcctataatcccagctacttgggaggctgaggcaggggaatcgcttgaacccgggaggcagaggtcacgccactgcactccagcctggcaacagagcaagactccgtctcaaaaaaaaaaaaaaaaaaaaagagtaagtctgtgtaacatgaacatctctgcttccacccaaaaccacagcctttgaatattatataaggaacttaatggatagatatgtttattatttttgatagcacaactgctttctctgctattataaggaaaactgagaatagcaggtgggtagggtaggatgaggaaacaagatgcccaaagcctagatgccacagaattcatggtgataatcagggcatattttgagtcctactagaaacaaacattccaaatgaactctgaatgcctgactcaggcgttttggaggtttgggttatccccttgtcattaggcacacaagggttttttgttgtttttgttttttgggtttttgttttgttttgaggcagtctcactctgttgtacaagctggagtgctgtattgtgatcttgactcactgcaacctctgcctcctggttcaagcgattctcctgccttggcctcctgagtagctgggattataagtgcctgccactatgcccggctaatttttgtatttttagtggagatggagttttgccatgttggccaggctggtcttgaactcctgactccaggtgatccaccctcctcagcctcccaaagtgctaggattacaggcgtgagccaccccgtccggcctgtttttaaggcattaattagtattgttaggaaagcagtaacaatgcaaacaccactcttctcttcacaaagatcaccttgagactgtgtctccattccacctgcctgagaagtgggagcatcagcctgttccaggctcttgggtagtagcatagccctttaaaaagagagagccattttccatgtgtttttggataagcacaatttgaaaatcatttcccaaatcctctttttgtttttgattctaaggtaaaattttccctaagccctcccaccatcccctcagccagtattagatgagatttgtatagcagcagaaactgacttataagtagagagctcttcagcaagactgagccttagctgttccatctctttgttcttctgttgctggagttgcaccccatttcttaactgcctctggcgttcttccatttcctccagctgttcctgcatgagatggccaagaacatttctaatgagccaaacaataaaaactcacattgtccactcttacttataaaacacttttttgttcattgtttaatcttgatagcagtattgaggctggtatttatatgataggttatgaaacaggttcaaagaagttgtgtcttggaaaaaaagtgacaatgcttttgaaaatgatgacgaaaaaggcatcttgtctgttaaccacagcttgctttaatagaatcctgggagggtgattgggactttttagtattacaaccttagtgtcattgaggaggattttggtctagttagtgggctgagtttcatatacctctccctccatgtgcaggtttgttaagataattggtagtttttaataatataaaatacttaagttgaaatacaaaagtgtggcaacaattattaaatattggctagaattctaggagagttacacaactagtggaagtccatgtttagaaaataaatggcttgtttaaggaaaagtttttgtgtccaaagctccttaaagtcagagagatttctacctggtacttaacatcatatggaaattgatgctttagtgagggtgttggctatcctattgctaatttcctgcatccttttttcttctttatttttgtatagagacagggtctcgctatgttgcccaggctggtcttgttcctgggctcaagcagtcctcccgcctcggtctcccaaagtgctgggattacaggtgtgagccactgtgcccagcttatccttttttcattacacaaaaagactgaatttggttagttctaagttggaagataaagatggtatgcacaggaggcccttgggagccctcagataactttctcattcttccagaatcaggctgggatgcattctgtaaattttccctgcctaggatgtatacctgaggaataaggtaaggaagatgtcagcaagtcagtctctggtttacctgctagctggcatggatccttaaggaagcaggagggagttgggaagagaggaaggggtgaagttggtatcttttaaagcgagagtgattttacctcagattttgaagaatactaaggaatccagttgttggggtacatgctattattagaaggatctagataatttgtcctctgagtcatacttgacattgtacctgtggcacatcaatccgcactgtttgatactctggctgaatctcagctttcaccaacattgtcaaaggaccttttttagtgcccagccatgcctaagagtgtgtcatctgaagagggaagcatctgcatactgctgtcctgattgctcagtcctcactacctaccagacccgttggtaaggtacaaaagtacatgcttggaaaagcagtctgcaccaccagtgataagctgtgacagagtggaacagcctcaatgaaatgaaggaaggattgctacagtggcattaaggatggtctcttaatcctgtgttaaccactagattaactttacaatcaactcaaaatccttcaaaggctttccactttctttagtggcattcagaccccctctagtttgacccctacctccaacttgaacctctgttactcttccgtatgaacattttcctctagccctggactactagtaccgaagtcactagtcacataggactcatttgaaatatgactagtctcaattgagatgtaatgtaagtgtaaaatacacagcagatttctaagacagcacacaaaatgtaaaatatgtcaaaaatatttgatactgattacatgttgaaatatatgtgttgggttaaataaaatgcattaaagttaa

SEQ ID NO: 109 - DNA, 6112 bp, Homo sapiens
tggatagcctctctctcattggttagggggcttggaaaaaagagactcggcgagccctcgctgtggtgctgccgccgccgccgccgccgccgctggagttgactcttctgctcgcactgctgctgcagcacaaacgtgacttccaacattttttatttatctttcccttttcttttccaagatgtaactacggatcagacactaaggaccttcacgtttcgctgatgtagtttttggaggaaaaaggggggggagtgaagggcgtcggtttttttttgtgtgtgtgtgtatgtgtttcgggggaaattttccattatgagtgttttactaaagtgaatttttttttgtttgcttcgttcgtctttggctctttttttttccttcccaatttcggatttatttcaaggcgaatctggctttgggggaagaggaagaaaagtcggattacaagatcaaccaccaccaacaacaataaaaaccaccaggatatttttttgcaaatttctgacggctttaaattcatgaagcaattgtccccttttgcaatcagcatttggatctcagaatgagcaaggaaagacccaagaggaatatcattcagaagaaatacgatgacagtgatgggattccgtggtcagaagaacgggtggtacgtaaagtcctttatttgtctctgaaggagttcaagaattcccagaagaggcagcatgcggaaggcattgctgggagcctgaaaactgtgaatgggctccttggtaatgaccagtctaagggattaggaccagcatcagaacagtcagagaatgaaaaggacgatgcatcccaagtgtcctccactagcaacgatgttagttcttcagattttgaagaagggccgtcgaggaaaaggcccaggctgcaagcacaaaggaagtttgctcagtctcagccgaatagtcccagcacaactccagtaaagatagtggagccattgctaccccctccagctactcagatatcagacctctctaaaaggaagcctaagacagaagattttcttacctttctctgccttcgaggttctcctgcgctgcccaacagcatggtgtattttggaagctctcaggatgaggaggaagtcgaggaggaagatgatgagacagaagacgtcaaaacagccaccaacaatgcttcatcttcatgccagtcgacccccaggaaaggaaaaacccacaaacatgttcacaacgggcatgttttcaatggttccagcaggtcaacacgggagaaggaacctgttcaaaaacacaaaagcaaagaggccactcccgcaaaggagaagcacagcgatcaccgggctgacagccgccgggagcaggcttcagctaaccaccccgcagcggccccctccacgggttcctcggccaaggggcttgctgccacccatcaccacccccctctgcatcggtcggctcaggacttacggaaacaggtttctaaggtaaacggagtcactcgaatgtcatctctgggtgcaggtgtaaccagtgccaaaaagatgcgcgaggtcagaccttcaccatccaaaactgtgaagtacactgccacggtgacgaagggggctgtcacatacaccaaagccaagagagaactggtcaaggacaccaaacccaatcaccacaagcccagttccgctgtcaaccacacaatctcagggaaaactgaaagtagcaatgcaaaaacccgcaaacaggtgctatccctcgggggggcgtccaagtccactgggcccgccgtcaatggcctcaaggtcagtggcaggttgaacccaaagtcatgcactaaggaggtgggggggcggcagctgcgggagggcctgcagctgcgggaggggctgcggaactccaagaggagactggaagaggcacaccaggcggagaagccgcagtcgccccccaagaagatgaaaggggcggctggccccgccgaaggccctggcaagaaggccccggccgagagaggtctgctgaacggacacgtgaagaaggaagtgccggagcgcagtctggagaggaatcggccgaagcgggccacggccgggaagagcacgccaggcagacaagcacatggcaaggcggacagcgcctcctgtgaaaatcgttctacctcgcaaccggagtccgtgcacaagccgcaggactcgggcaaggccgagaagggcggcggcaaggccgggtgggcggccatggacgagatccccgtcctcaggccctccgccaaggagttccacgatccgctcatctacatcgagtcggtccgcgctcaggtggagaagttcgggatgtgcagggtgatcccccctccggactggcggcccgagtgcaagctcaacgatgagatgcggtttgtcacgcagattcagcacatccacaagctgggccggcgctggggccccaacgtgcagcggctggcctgcatcaagaagcacctcaaatctcagggcatcaccatggacgagctcccgctcatagggggctgtgagctcgacctggcctgctttttccggctgattaatgagatgggcggcatgcagcaagtgactgacctcaaaaaatggaacaaactagcagacatgctgcgcatccccagaactgcccaggaccggctggccaagctgcaggaggcctactgccagtacctactctcctacgactccctgtccccagaggagcaccggcggctggagaaggaggtgctgatggagaaggagatcctggagaagcgcaaggggccgctggaaggccacacagagaacgaccaccacaagttccaccctctgccccgcttcgagcccaagaatgggctcatccacggcgtggcccccaggaacggcttccgcagcaagctcaaggaggtgggccaggcccagttgaagactggccggcggcgactcttcgctcaggaaaaagaagtggtcaaggaagaggaggaggacaaaggcgtcctcaatgacttccacaagtgcatctataagggaaggtctgtttctctaacaactttttatcgaacagcgaggaatatcatgagcatgtgtttcagcaaggagcctgccccagccgaaatcgagcaagagtactggaggctagtggaagagaaggactgccacgtggcagtgcactgcggcaaggtggacaccaacactcacggcagtggattcccagtaggaaaatcagaacccttttcgaggcatggatggaacctcaccgtcctccccaataacacagggtccatcctgcgtcacctcggtgctgtgcctggagtgactattccctggctaaatattggcatggtcttttctacctcatgctggtctcgagaccaaaatcaccttccatacattgactacttacacactggtgctgactgcatttggtattgcattcctgctgaggaggagaacaagctggaagatgtggtccacaccctgctgcaagccaatggcaccccagggctgcagatgctggaaagcaacgtcatgatctccccggaggtgctgtgcaaagaggggatcaaggtgcacaggaccgtgcagcagagtggccagtttgtcgtctgcttcccgggatcctttgtgtccaaagtgtgctgtgggtacagcgtgtctgaaaccgtgcactttgctaccacccagtggacaagtatgggctttgagaccgccaaggaaatgaagcgtcgccatatagctaagccattctccatggagaagttactctaccagattgcacaagcagaagcaaaaaaagaaaacggtcccactctcagtaccatctcagccctcctggatgagctcagggatacagagctgcggcagcgcaggcagctgttcgaggctggcctccactcctccgcacgctatggcagccacgatggcagcagcacggtggcggacgggaagaaaaagcctcgaaagtggctgcagttggagacgtcagagaggaggtgtcagatctgccagcacctgtgctacctgtccatggtggtacaagagaacgaaaacgtcgtgttctgtctggagtgtgctctgcgccacgtggagaaacagaagtcctgccgagggctgaagttgatgtaccgctacgatgaggaacagattatcagtctggtcaatcagatctgcggcaaagtgtctggtaaaaacggcagcattgagaactgtctcagtaaacccacaccaaaaagaggtccccgcaagagagcgacagtggacgtgcccccctcccgtctgtcagcctccagttcatccaaaagtgcttcgagctcatcatgaagatgccaacgcccgtggtcgatttatatatatttttttgtaattattatattctagtttggagtacttgctgtaggattcaagctgtctttgcactagctctaaagaagattttcttctggttttagagaactaattttgttttagcattaaactgttgaacttttttttgtacttagaaaacctagatactgcagtcagattttggaaactgccgtatagtcactgttttaaaaaccccggaggggctgtattaatttgtattgccccatggctgacaaaagcctttttttttggttttgatttttttttttttgtaactgttggggggaaaaaggctttttaacccatttttgaagagggtgaagtttggagaacaaatttaaaaaccatcagtcatgtgagcagattttttagaagggataggagacacacgcgcacacacacacacacacgaaacttgaaatggctttgctttggctgtcgtcttctgccgtgtgccagatgagcttgtgatctgggaagccggggcacccccgttttgtttctctgggcggttgtggcagctgaaggcggacgttgtttcctaaccataggtggaacgaggagacgggagcgagtgggctctccaccagcacatcactatgcatctgttccaggaaagaagaaaagcgagcgaggaagacggaaaagactgcctgccttggaggggtcacatgagggagacctgtgcctgatttcattaggaaatccattctgttattttttggtgctgttggctactttatcaaaaaacccttcaatagcatccttaagatttaaaaaaaaaaaaaaaaaaaaggaaaaaaaagtgatggaagccgtaagtgcttctttgtcatcgacgtgcaatctttctaacattccatctccatctcaccgcttcttgtttgacaccttcacaagtcagcattaatctttcttttaaaacttgtttcatttatgatcatgtagagagccactaggaggcctgcagttatttttgaatgtgaaaatgcatttgcgttcatcttgtctattttttctcttcatgttgtaacaaaaaggaaaaaagaaaaaaaaatcccatcccttttgtacatatgcctgtaaattgttttaaatacttgagcctttttctcggtggggggtggggaggggggtgagaagacaagatgaagaaaagccttacatttcagtttcttcatcggttggattggatgcttacagggtttttcttgtaacatttataagtgctgcttacatcactgaacaacaacaaaaaaataataatggagtagctgttgcccttctccggttgtgtgtacagtatgtgtggaataaaaaagggaaactgttttcacaagctgttctttgtttcataattggattcatcaatcccgtagctacccatattgcactgagcttgccagtggtgactgccaggaacgtcctatgatccactttgttggttgttgttgcagaagactgaactgttttggaatatttaacaattacagaaacagtcaagtgttttccaatgtggttgtccggtttctatggccttgctgtgtactttccctctttttgacagtaaacttctgcctatggcttacagtttgacatttaatttattagcgctgctctgcacccctcccttgggagggagacttcatgtggtttattgcgagttttttgtttacttttcaggtttgtactacaaggtttaataataaaaacaaagttttttggacatttgtctgtcttgtggaaaaaaaaaaaaaaaaa

SEQ ID NO: 110 - DNA, 3159 bp, Homo sapiens
agggcgaacgggcgagtggcagcgaggcggggcgggctgaggccagcgcggaagtctcgcgaggccgggcccgagcagagtgtggcggcggcggcgagatctgggctcgggttgaggagttggtatttgtgtggaaggaggcggaggcgcaggaggaagggggaagcggagcgccggcccggagggcgggaggaggcgcggccagggcgggcggttgcggcgaggcgaggcgaggcggggagccgagacgagcagcggccgagcgagcgcgggcgcgggcgcaccgaggcgagggaggcggggaagccccgccgccgccgcggcgcccgccccttcccccgccgcccgccccctctccccccgcccgctcgccgccttcctccctctgccttccttccccacggccggccgcctcctcgcccgcccgcccgcagccgaggagccgaggccgccgcggccgtggcggcggagccctcagccatggcctcgggcgacaccctctacatcgccacggacggctcggagatgccggccgagatcgtggagctgcacgagatcgaggtggagaccatcccggtggagaccatcgagaccacagtggtgggcgaggaggaggaggaggacgacgacgacgaggacggcggcggtggcgaccacggcggcgggggcggccacgggcacgccggccaccaccaccaccaccatcaccaccaccaccacccgcccatgatcgctctgcagccgctggtcaccgacgacccgacccaggtgcaccaccaccaggaggtgatcctggtgcagacgcgcgaggaggtggtgggcggcgacgactcggacgggctgcgcgccgaggacggcttcgaggatcagattctcatcccggtgcccgcgccggccggcggcgacgacgactacattgaacaaacgctggtcaccgtggcggcggccggcaagagcggcggcggcggctcgtcgtcgtcgggaggcggccgcgtcaagaagggcggcggcaagaagagcggcaagaagagttacctcagcggcggggccggcgcggcgggcggcggcggcgccgacccgggcaacaagaagtgggagcagaagcaggtgcagatcaagaccctggagggcgagttctcggtcaccatgtggtcctcagatgaaaaaaaagatattgaccatgagacagtggttgaagaacagatcattggagagaactcacctcctgattattcagaatatatgacaggaaagaaacttcctcctggaggaatacctggcattgacctctcagatcccaaacaactggcagaatttgctagaatgaagccaagaaaaattaaagaagatgatgctccaagaacaatagcttgccctcataaaggctgcacaaagatgttcagggataactcggccatgagaaaacatctgcacacccacggtcccagagtccacgtctgtgcagaatgtggcaaagcttttgttgagagttcaaaactaaaacgacaccaactggttcatactggagagaagccctttcagtgcacgttcgaaggctgtgggaaacgcttttcactggacttcaatttgcgcacacatgtgcgaatccataccggagacaggccctatgtgtgccccttcgatggttgtaataagaagtttgctcagtcaactaacctgaaatctcacatcttaacacatgctaaggccaaaaacaaccagtgaaaagaagagagaagacccttctcgaccacgggaagcatcttccagaagtgtgattgggaataaatatgcctctcctttgtatattatttctaggaagaattttaaaaatgaatcctacacacctaagggacatgttttgataaagtagtaaaaattaaaaaaaaaaaactttactaagatgacattgctaagatgctctatcttgctctgtaatctcgtttcaaaaacacagtgtttttgtaaagtgtggtcccaacaggaggacaattcatgaacttcgcatcaaaagacaattctttatacaacagtgctaaaaatgggacttcttttcacattcttataaatatgaagctcacctgttgcttacaatttttttaattttgtattttccaagtgtgcatattgtacacttttttggggatatgcttagtaatgctacgtgtgatttttctggaggttgataactttgcttgcagtagattttctttaaaagaatgggcagttacatgcatacttcaaaagtattttcctgtaaaaaaaaaaaagttatataggttttgtttgctatcttaattttggttgtattctttgatgttaacacattttgtataattgtatcgtatagctgtattgaatcatgtagtatcaaatattagatgtgatttaatagtgttaatcaatttaaacccattttagtcactttttttttccaaaaaaatactgccagatgctgatgttcagtgtaatttctttgcctgttcagttacagaaagtggtgctcagttgtagaatgtattgtaccttttaacacctgatgtgtacatcccatgtaacagaaagggcaacaataaaatagcaatcctaaagcaagaatatggcagaacaagatctgtaagcacagtcttattttcttttgttgtccagaatacttataattcttgagcctcccagaaattggaagctaaataaagcaactcaagtttcctttattttgcactcaattacagtgattattgatgaaagcgatgcatggatattttaatacttcctacatgtcctgacttctgaaagagagtaggtaacaggcatcccgagttcaggaactacctcagaacaccccaggccaggttggtcataggctgtgattttagcccccggcaagtgtgagtgaagcatctgtaccaccgcgcaggctgagcgcctgcgcagggtaaggtgccacctggcagtggggcacacagagggaagaccaggcctgtccatcagccggctgccttcagaggcagctccagcaggaccttggcttgtctgacaggaaatgcttgtggtcgttggttatttggtttgagagcccttgttcctccatctagtggagtccttattaaatgctagcaatgtggcaattgagtgccagtagcttaatttcatgtttct

SEQ ID NO: 111 - DNA, 4265 bp, Homo sapiens
ggcggtccgggcgggtgactggcggcgggcgccgcggtcgggctggctgccgggcagcatggaggagctgagcagcgtgggcgagcaggtcttcgccgccgagtgcatcctgagcaagcggctccgcaagggcaagctggagtacctggtcaagtggcgcggctggtcctccaaacataacagctgggagccggaggagaacatcctggacccgaggctgctcctggccttccagaagaaggaacatgagaaggaggtgcagaaccggaagagaggcaagaggccgagaggccggccaaggaagctcactgccatgtcctcctgcagccggcgctccaagctcaaggaacccgatgctccctccaaatccaagtccagcagttcctcctcttcctccacgtcatcctcctcttcctcagatgaagaggatgacagtgacttagatgctaagaggggtccccggggccgcgagacccacccagtgccgcagaagaaggcccagatcctggtggccaaacccgagctgaaggatcccatccggaagaagcggggacgaaagcccctgcccccagagcaaaaggcaacccgaagacccgtgagcctggccaaggtgctgaagaccgcccggaaggatctgggggccccggccagcaagctgccccctccactcagcgcccccgttgcaggcctggcagctctgaaggcccacgccaaggaggcctgtggcggccccagtgccatggccaccccagagaacctggccagcctaatgaagggcatggccagtagccccggccggggtggcatcagctggcagagctccatcgtgcactacatgaaccggatgacccagagccaggcccaggctgccagcaggttggcgctgaaggcccaggccaccaacaagtgcggcctcgggctggacctgaaggtgaggacgcagaaaggggagctgggaatgagccctccaggaagcaaaatcccgaaggcccccagcggtggggctgtggagcagaaagtggggaacacagggggccccccgcacacccatggtgccagcagggtgcctgctgggtgcccaggcccccagccagcacccacccaggagctgagcctccaggtcttggacttgcagagtgtcaagaatggcatgcccggggtgggtctccttgcccgccacgccaccgccaccaagggtgtcccggccaccaacccagcccctgggaagggcactgggagtggcctcattggggccagcggggccaccatgcccaccgacacaagcaaaagtgagaagctggcttccagagcagtggcgccacccacccctgccagcaagagggactgtgtcaagggcagtgctacccccagtgggcaggagagccgcacagcccccggagaagcccgcaaggcggccacactgccagagatgagcgcaggtgaggagagtagcagctcggactccgaccccgactccgcctcgccgcccagcactggacagaacccgtcagtgtccgttcagaccagccaggactggaagcccacccgcagcctcatcgagcacgtatttgtcaccgacgtcactgccaacctcatcaccgtcacagtgaaggagtctcccaccagcgtgggcttcttcaacctgaggcattactgaagccccggcgccaccagctgcgcggtcttactccccttccctgcctatggtgtcgcttggctaagtgactcccagcccaagccccctcaagagtctgggtcgggggaggaggagtgggtggcctccttgatgggcaggcttggaagggacttctcccgcaccccactctgtcccaggacatagggcagggggcctcactgccttgttggtctccaccttgttcctacctctgcaggcctctttgctctcccctcttgcctcaggaaacccggtggcacctgtggctccaggtgactgtcttgaacagagcgggcttcttcatggctgcgttgttgctgagtttgaactgctcctccctggcctgcgtgactgaatcacagctttggtccctgtcttgcaggggctgaggtgtcaggaggggacttctggcccaccttgccttcagccctggagtgggcagagagtattgtggggaggcatggccagtgggactagtgttccctccatctggccacagcttttgggagatggggtgggcaggggtggtcctggctggcattgcctgagccggcagtgatgaagtggggagcttgcccttgacaggtgggggctggctggggccttaatgtgaaaagacagtggcaggcagctggagtagagcgagcccagcagccctaaaaggctgccttcatggccatctagccccagttcagggcagcatccatagcccacaagccagcgtgggtggggcgggggtggtcccacagctgggttccacctgaagagcctccgtgcctcggagcaggagaggcaggctatggctgccaccctccctcctgcctgtgtcccagtgagaactgacctgagtccccttccaaacccagacccacctcctgccccaggcccactgaagcatgttccatttctaaaaagcccagagttcagtgtgtcccaaggaaaacccaaagtggaggtgctcaggtccaggggagtccagtgggcaggacccttggcaggcaagcccctcccttcactcccaggacctaccttctgctagtaaaggactggcttcattctaattatggcccacagactgccccggagacctggaggacagcagtgctggcacttgggtgtccatgggcccgtctgccggctctgcctgtgctgcaagtgttggccgtgggtccagccaacaactccctacgtcctgtgtggggccctgcccaagtggatgaggcattccttgaggagtatcattttccctgacaatccccatcacctttaggggttccctgcttggctcctttccagctgaaaaactagacctgtgccattggggaagctggacaaagtctagggggcccgcctggtagagggtcccgggaagctggatctgtcagcctcggccctgaggcccctgttaactcaagactgtgagctgcctctaggtggtcacgtctgggagctagcttgtatggcttctgaccagtatcaggatttctgttctgagagcagcgtgggcagcaaggcagggcagcccagaggtggcagcggcaggcaatctggtcactaggtctttgtgatgccaaaaataaaagagggtggggtgggtgctttctgttcctctgattggatggagtccgccagcaggcatggggctacattccagtgcctgactatagggaggcactcctgattccatggagcagcccggactttgagaatgggctctggtttgcggggggcaggcgtaccagactgcaagaccccccagtacctcaccgtgccaaataggaagaggtggccttggtgtagccaaatggatctttttaacagtgtgcctttggggagggacccatgtccatggcttcgttgagggccatccatatgccagctgggggccagcccacagtggccatattggctgcagcaggaatggtgcccacctcggcgaattgaagggctaagagtcccagatagctaggccagagctggaagcagacagtaaggggaagagctgctcccacaggagagggagagattccagctcactgcgcagcctgggaggaggcgtggatcctggcacgctgagcctcaggcaccagcctccctgtgctcgacagcaaagtcttgactccttcctgctgagcactgtgctaccttcactgctccaaagccagactaacagctctccaagcccttggggtgactcggcttccaggagctgttggagaaatgaggatgtctgtccctgtctgcctgggcaggccagattcctccccagcagccgggtctctccagaccctgattcggtgcctttctgtttaccagctacttcaatcccaaagtttgaatctgcagataccttactcccagccactttgccttcttactgtgttgtgtgtttttcctggtgcttcaagagcgtgtgcagggcaagtgccgtcactgggaactgcaccagatgctcagacttggttgtcttatgtttaccaataaataaaagtagactttttctatttttatttgctgctatttgtgtgtgtgtttgtgtttgtgtagctaggtatctggcacttctgacgatgcattgttgcttttttcc

SEQ ID NO: 112 - DNA, 2655 bp, Homo sapiens
agccggggcgggcgcgggcagcggcgggccggccgggctgtgcggggcgagcggcggcggcggcgggggcgcttcggccggggcggcagctgggcgccggcgggagctagcagcgtctgcagccgcgccggccgccagcgccccggcgcgctccggctcggccatggagctgccagctgttggcgagcacgtcttcgcggtggagagcatcgagaagaagcggatccgcaagggcagagtggagtatctggtgaaatggagaggctggtcgcccaaatataacacgtgggaaccggaggagaacatcctggaccccaggctgctgatcgccttccagaacagggaacggcaggagcagctgatgggatatcggaagagagggccgaagcccaaaccgctagtggtgcaggtgcctacctttgcccgtcgttccaatgtcctgaccggcctccaggactcctccactgacaaccgtgccaagctggatttgggcgcgcaggggaagggccaggggcatcagtacgagctcaacagcaagaagcaccaccagtaccagccgcacagcaaggagcgggcgggcaagcccccgccgccgggcaagagcggcaagtactactaccagctcaacagcaagaagcaccacccctaccagcccgaccccaaaatgtacgacctgcagtaccagggcggccacaaggaggcgcccagccccacctgcccggacctgggggccaagagccacccgcccgacaagtgggcgcaaggtgcgggggccaaaggctacctgggggcggtgaagcccctggccggtgcggcgggtgctccaggcaaaggctccgagaagggcccccccaacggaatgatgccggcccccaaagaggctgtgacgggcaacgggattgggggcaagatgaagatagtcaagaacaagaacaagaacggacgcatcgtgatcgtgatgagcaaatacatggagaacggcatgcaggcggtgaagatcaagtccggcgaggtggcagagggggaggctcgctcccccagccacaagaagcgggcagccgacgagcgccaccctcctgccgacaggacttttaaaaaggcggcgggcgcagaggagaagaaggtggaggcgccgcccaagaggagggaggaggaggtgtccggggttagcgatccgcagccccaggatgccggctcccgcaagctgtccccgaccaaggaggcctttggagagcagcccctgcagctcaccaccaagcccgacctgcttgcctgggacccggcccggaacacgcacccgccctcacaccacccgcacccgcacccccatcaccaccaccaccaccaccaccaccaccaccacgccgtcggcctgaatctctcccacgtgcgcaagcgctgcctctccgagacccacggcgagcgcgagccctgcaagaagcggctgactgcgcgcagcatcagcacccccacctgcctggggggcagcccagccgctgagcgcccggccgacctgccaccagccgccgccctcccgcagcccgaggtcatcctgctagactcagacctggatgaacccatagacttgcgctgcgtcaagacgcgcagcgaggccggggagccgcccagctccctccaggtgaagcccgagacaccggcgtcggcggcggtggcggtggcggcggcagcggcacccaccacgacggcggagaagcctccagccgaggcccaggacgaacctgcagagtcgctgagcgagttcaagcccttctttgggaatataattatcaccgacgtcaccgcgaactgcctcaccgttactttcaaggagtacgtgacggtgtagccggagggcgtcggaaggggaagcgccattcccgcgggggggcggggagctgagcacctggggcctcggggcgggctcccctctcgccaacccgccaaccgcgagagacccaggctggcccccagggtgaggacgcccggagcggaggtaaccatgttccccctgcggcggctgtcagacctgggcggaggccccttccacgcggtgccggcggggctcgccctctcctgcccttccccgctggagatggacccccggaacggacagggcagctctgcgcccggcctcagagttctagtattatattttaaccgtgctaacttgtcaagtgctgactctactcccgtttgtacgtggtgttattattgaaatgtattgtttgagctcaaaaggcccgaccaccccccttcgggctgctatatatatatttatttgtaggtatttatatattgaaatataaaaacctagatttatggagtttcctctagatcatgttatattctatatcagacaaactattttcttttgacctttcttcccctccatccagtatttcggttgatttcattttctcccctctcttccccttccacgaactgcaataccagtaaccttggtatatattttttgatactgtacacatggatgtcttgtttctatgtgcaaaaaaaaaaaaaaaaaaaagtttgttaaaaggctacacgagctctctagaaactgctgctactagaaatgtctaaactataagcttccaactattacctgcttgaatgtaaatattaaatggagatgttgaaggtgcaaaaaaa

SEQ ID NO: 113 - DNA, 6165 bp, Homo sapiens
gtgacggcccgcagctggaacgcgagcgcgcgccccgccgcgctcccgcccgccggggcctgggcgctgcggcgcgtgcgcgagcggtgccgcaccggccgcgggcgcagggagtattatgggctgtgggtgccgctgagcaagatggagctgtctgcagtgggcgagcgggtcttcgcggccgaatccatcatcaaacggcggatccgaaagggacgcatcgagtacctggtgaaatggaaggggtgggcgatcaagtacagcacttgggagcccgaggagaacatcctggactcgcggctcattgcagccttcgaacaaaaggagagggagcgtgagctgtatgggcccaagaagaggggacccaaacccaaaactttcctcctgaaggcgcgggcccaggccgaggccctccgcatcagtgatgtgcatttctctgtcaagccgagcgccagtgcctcctcgcccaagctgcactccagcgcagccgtgcaccggctcaagaaggacatccgccgctgccaccgtatgtcccgccgtcccctgccccgcccggacccgcaggggggcagccccggactgcgcccgcccatttcgcccttctcggagacggtgcgcatcatcaaccgcaaggtgaagccgcgggagcccaagcggaaccgcatcatcctgaacctgaaggtgatcgacaagggcgctggcggcgggggcgccgggcagggggccggggcgctggcccgccccaaagtcccctcgcggaaccgcgttataggcaagagcaagaagttcagcgagagcgtcctgcgtacacagatccgccacatgaagttcggcgcctttgcgctgtacaagcctccgcccgcccccctggtagccccgtcccccggcaaggctgaggcctcagccccgggccctgggctacttctggccgcccccgccgccccctacgacgcccgcagctctggctcctccggctgcccctcgcctacaccacagtcctctgaccccgacgacacgccccccaagctcctccccgagaccgtgagcccatccgcccccagctggcgcgagccggaggtgctcgacctgtccctccctcccgagtcggcagccaccagcaagcgggcaccgcctgaggtcacagctgctgccggcccggcacctcccacggcccctgagcccgccggtgcctcctccgagcccgaggctggggactggcgccccgagatgtcaccctgctccaatgtggtcgtcaccgatgtcaccagcaacctcctgacggtcacaatcaaggaattctgcaaccctgaggatttcgagaaggtggctgctggggtagcaggcgccgctgggggcggtggcagcattggggcgagcaagtgagggggctccaccaaggaggggggcttgggggggccctcctgcccgaagtcatactcttgctcccaccccacccttgcccccagccctctctccctgtgctttgcttgtctcaaatggctcggtgttgacccagggatggggctgggtagttggggtcccagaaagccgggggtaggggccaccctggaatggggcaggggaagggcacaccccctgcccatgcatggtagcccactgggtggtttctggaaagccctagaaactagggttcctctgccccttccacatcccacctgtctctctagcttgcttcctgctctcctgtgcggcgtctgatttctcggtgctaacctggcagctgtggggcccttaggagccccccaccgagggtggacacagtccctttccttcctgcagatgcctaggcaggaggagggcttcctgcctgtttggcaaagtcccaggcagaggccaaggatgaggcctgactcggctcctccctccacatcagccagggcatcagaagttgggccagggcggggtcttccctgctcgattttggacgaggcctaagtagaccccctatgccctgccccagccctggctctttcctaaccccctcaacggtgggaggaactggcagagggtgcgcctggccacagcctccccgcatctaaaggccccttcagttcttgaccaaaggtgctacgagaacctgccgtggaaacttccagttgtgcgtctgccccactcgctgtgtttgtccgtgggttcatacatgcattgggtgctaggccccaggctgccgggtggcaccctttacagttcctttgaacaggggcattgaaggcctggactgcctctcgcctcagtaggcctggggaccaggcttgggtctggaggtttgctgtggaagtcaccaggcctcccctcctggcccaggtgtgctgggggcaccgtgccccccacccccctgccctcctcagggtggtcagcccaacctgtcggaccttcacttcacatcatggtggggaccgagatagagagggagaccccattccaagctccctcttcctccgggtgtttggggaggatgctgaagaatccattcccgagggcctcccggcttgtcccagcccctcttttgcttctgaccacggaggctttctcacagcccagcctgcctgaagcaaaggaggctcccgtgtcctgggcagcttctgtttccctctgctgcctgggagctgaggcacccgtgccagtggcagaggccacagccccagccttaggccaggccctgggagggcaggcaggcaaaggggagaccagagggtctgtgttctccaggagaatgagggtgttggtcccagaattgggaccggggccccgctggccagccctgggccacttcccgggtctccattgtgcgtgggtggcgtgttccaggcgtggctggagctggcttcctggctgtgctgccatgggcccctccctcagaagcacgttggcaggaggccgatcagaaccctagcgcctttggtcctaagaatgggaggctgccttccttcccaatctccctgccagggcccacagcgtggccctagccctcccctccccgggatgtagaacggggaccctcgcagggttggggcgggggctgatactcctcggcccctccctaccctgccctgtgtgttggctttgtggccgtccaagtgccaattggcttttcgcccaaataagggctggtatttctcctctgtccttggaggtgatttccccctgaccccctcccccaggtgagtgaccacctgggtgccagttacaggtgtttccagagaccatagaaatgtgttttcctgagagttcgtgtcattcgtgacttttttgtaaagaagttgtgttttcagaggtgattttatgacaggaaagtgaaagaattagttttgcaaaaaaacaaaaacaaaaaaagaggaaaaaaaaaagaaatagaaaaaaatattgtgggattcctatgggggggtggcgggggagaaagagctatttaagaaaaaatagtaacgcagtgattgcacaggtgaggtggcaatgtcaggatggggcggaggcctgggcccagctggcaggtcccctggcatcgcaggcactgtggagagggcctggacccagatctccacacccgtgcttgctcaaagggaaggacaacagcgggcccccgggagctaacccaagctgcaggtcccggcaagctgaggtttgggagggtgggggttgtcactggtgattttctccagggggctggtgagtgggcagtttggtttcttgcccccttctgttcctttcccagttgttgggccatctggtccccaccaccgccaccctatgggggagacctccctccccacgggtcaccctaaagcccacaacctctctgagcctccctggcctgaaaggggatgcaggcttcaggaggcaagaagctgggcccctgggggtggctggggagagggaatgcatttcccttgccacaggtggtctgcttctgctggcctgagctccaagtggagcagcccgggccagccttggtgcatgaagaggcaccaggcacaccgccttgaggtgggcagtgcccatgggggcccgagtggatgggaccgagggtgagtggagcctccttcctcccctctctagtacccccgcctcccacacacttgcacggatcggcctcccttgggagatcagcctccatgggcccctcgtccacccttgctgctttccatttgcctaattaccaagcagaagttgcaatctggtttgctttatttttgtatgtgaaataacccccaaagcccaatctcctcctacgttcaatattggttggggcatccgtcatctccccttaagtgcgccccctccccacccaagtatcataggaaaccggtgaggtctggtgtctctggtttgagacggtaagttgggacccatccctgtctgggtgcccactctgacctttagtttgcccttctgtgaaatgggtgtattgggtagcaagccctcttcagaaagcgctgctggtgtcagagcagctgcccagtaccaggtggggggtcaaggttgctggtactggggcccccagctgcccacaacccctctttgttctcaccctgcaaaggggtcaaggtcaaaatgagcctcatccttcctatgatctgggaagaggtgatgatcaagtccccaacttcagtgtgaggtggacagagttggggggatggcccctttttgaagaggtgaaaatggttttggagaagcgcagctgcttcactgggggaatgcggcagggactggggcccaggatgctttggcctatggggaaaagccctttaaaaggcagggcccaggccctggagccagcacaagactggcctcgagcccctgagccaggaggtcctggaggagagccaggccggtgggcccgcccaaggctggagggtcagccccaacagggagctgggttggccagggggctggactgctaccagcctctctggcctatggggacccaagaggacacatcccccttttgcccactcttctgtgtcattttgttgttttggtttgtggtggtttttcttttttcttttgtttttcttttttctttctttctttttttttttttttttttttttttttgcacttcgcccacacaggacagtggagccccacctggtcagttccacttccgggctcccatgcacttgcccaaggcggcctctttgggacggggatggtttgaggaaacacttttaaagaaaaaaggaagacattgaaaggttttagtttcttccctatctgcatgtcctctcatatagaaagcccagaattaggggctagaactccaggagagggtctccccgactcatctcttgctgacggtcaccaggatgcagaaatagggagatggttagtgggggccaaagatgccccctcccaggccttcgtggttccctcctccgccccctgcaatctttggaggagtcagtgcctcactccagcagtgagtgcctactgtatgcaggtagtcagccaggcaaagagagactaacggtctcatgggggaaccctcttgcgggaggccgggtagctggagcgaagcgttccggctgcccttgctgctgggtggagtggagagggagacttctttttgttggttttaatttaaaaacacaaaggcctaaagaaatacgtatcttataatttttttaatttttgagacgttcatttaatgaattgtgcacgaatgaattctatatatataaaatatacatatatagctctatatttggggaggggcactgtctcttttttctctcatttttaaaatgaagtgttgttgcctttgtatgtggttcaaccatccagctcccagctggctaaactttgcctccagtggtcaaagatgggaaaagagtggggttggcaggagatggaaaacggaggtgccgccccagcatggggggcaggtcccccagtccaccctgcccctccccctgtggagaagacgcttagttgggggtgtgggtttgggctccattctggattcggcggttccgggggaggggtgggtctgtgccgattactctgtcttgtacgtttgttctgctgctcttcaatattgtatcaacgccaggaaaggggggtgaaaagcctcttttaccccccaaataaattgtcacattccgaagctgaggcctagcccctaggttggggtgtgtctgtgtcttc

SEQ ID NO: 114 - DNA, 3964 bp, Homo sapiens
ccagccccagcatcgcgcgccgcagccgcggccccgcagctccgcccccggcccggcccggccccgggcccgctcgcccgccgccccgcatggagctgtcagccatcggcgagcaggtgttcgccgtggagagcatccggaagaagcgcgtgcggaagggtaaagtcgagtatctggtgaagtggaaaggatggcccccaaagtacagcacgtgggagccagaagagcacatcttggacccccgcctcgtcatggcctacgaggagaaggaggagagagaccgagcatcggggtataggaagagaggtccgaaacccaagcggcttctgctgcagcggctgtacagcatggacctgcggagctcccacaaggccaagggcaaggagaagctctgcttctccctgacgtgcccactcggcagcgggagccctgagggggtggtcaaggcgggggcacctgagctggtggacaagggccccttggtgcccaccctgcccttcccgctccgcaagccccgaaaggcccacaagtacctgcggctctcgcgcaagaagttcccgccccgcgggcccaacctggagagccacagccatcgacgggagctcttcctgcaggagccaccggccccagacgtcctgcaggcggctggcgagtgggagcctgctgcgcagccccctgaagaggaggcagatgccgacctggccgaggggccccctccctggacacctgcgctcccctcaagtgaggtgaccgtgaccgacatcaccgccaactccatcaccgtcaccttccgcgaggcccaggcagctgagggcttcttccgagaccgcagtgggaagttctgaatcaccgtttttactcttcttaaactgttttcttttgggcttggggtgggacttccagagatagggatgggttgggggcggggtaattattttatttaaaaaaataccgagcagcaaaaggggagaagatcccactactctcccaccacctgccctttctctgagggacgtttaccacgaggcctcaggctggggatggagagagttgctctgggagttggggtaccacccccagggcaggatggggacaggatcacctgcccgggacaccaccattatcattctcctctagtgacgcagcagctggttctgggagttaaaggagcattggaaggcccaaaccctctcccttgagtggccaccccagcctggttggctggttttccccttttctcttgtttcaattgggtctttaccttgaactctcctctctggctttgcggtgggctgtggaggctggttttgaccaaaagtgagtggggcgggaggaaggggcaggaggaagggttgaggttacttggggcgagtcccttccccttcagagaggcttctatccttcccagggaggaggcgccgctgagacccttctgctgagagctctgccctcccctcatcacctggcctgtgcagaaacgctcatgcacacctggctgcacaggtgtgcacgcattacccttcgcgtgtacgttcccatgtgccccgtgaaagcatgtgtggctgcagacgtgtccacatgggccttgcgaacctgggttagaaaccctggccaggcgaacgtggggtgattcacagcacaaaagacctcaccaccacacctgcactcaccccaccttgcatgcaccttgctacctgcttgcggctttcagtggagggcaggggtctggcacaggtgcgatggcaccccatgctccaggcatacagatgtggtttctcggctgcaccgggccaggctgcgggtgtgcaggcgtctgctaagttgtgtgatgtatcagcacaggctttgagacgtctggaccctgtccttcctcccgtgaggggttcttgttctttctgactcaggtgacttttcagcccttccaattcccctctttttctgccctcccctccaactcagccaacccaggtgtgggcagtcagggagggagggagtgtcccaccacgttctcagggcagcccttgactcctaagccccttcctccttccattctgcatcccctccccatccaacctaaatgccacagctggggctgagctgtattcctgtggagggacctctgccgtgcctctctgaggtcaggctgtgctgtgtgatgggcaggctttgccccagcccacccctggcaaggtgcacttgttttctggtttgtacaaggtgtcctgggggcccgtggcttccctgccagtgaggagtgacttctccctctcttccagtcctgtaggggagacaaaaccagattggggggcccaaggggagcatggaaaaggccggctcccctgtctttccttggctgtcagagtcagggtaacacacaccaagagtggagtgcggccagcaagtttgagacctgcccgccctcctcgcagctctgctctgtgtcctcaggaagtcacagagtctactgaggcaaggagagggtgattctttccccaaatcccttcttccctggttcccaaaccaaagacagcctgcagccctttctgcatggggtgctctgttgacaggcttcccagatccctgagtctctctttccttcctcctcgatctttagttgtccacggtcaattcagtgcttccattgggggacagtcccctccgggatgacctgattcacctccagcccagggaatggaatctagaggaatacgtggggtgggtctggacaaggagcggcaggaatcaccacccatctccagctgtggagccctgtggaggggaaggggaagcttggggttcagaggggactcttccaggagaggggtgcccagcggaggtaaagatgatagagggttgtggggggtctctagttgaatgttttggcccatgactttggaacatggctggcagcttccagcagaagtcacgctccccatcccccaggggacataggacctttttcctgcttcctggtcactttcaaagaactatttgcgcaatctgtgggtctgtggattcacggggctttctgtgtgggtgctgcagttgcttttgtctgcagcagcaggacacatctttcctcttactcagccctttatggcccatggggaactccgtggctcagggagagctgaactccaggggtgtgacctgggacgggtgggcctgaggtgcccagctcagggcagccaggtggctcatgggctgtagtgagccagctccctgggggaaaaggctgtgggccgttaggaccatcctccaggacaggtgacctctatgaggtcacctacggctgtggccgtgcaggcctccttccagcccagagtggcccagtagagcaaggcagacagtgacctccacccccgcagccctcttaaaaggccagtactcttgggggtggggggagggtttagaaagcatttgcccatctgcctttctttcccccagcccccacccgctttgaatgtagagacccgtgggcacttttccttttgtggtggggggtgcggaggaggtacccccacccctggcacagccgcctggaatgcaggactgtcactgctgttcgggtgatgacctcgttgccaagctcctcctgtccccttgttctgggggcaggcgctgtgcttctgtgaggtggtttagcttttgctttcgaagtggccagctgcggccaccaggtctcagcacaagagcgcttcctttgcacagaatgagcttcgagctttgttcagactaaatgaatgtatctgggaggggtcgggggcacgagttgattccaagcacatgcctttgctgagtgtgtgtgtgctgggagagtcagagtggatgtagagcgcggttttatttttgtactgacattggtaagagactgtatagcatctatttatttagatgatttatctggtaaatgaggcaaaaaaattattaaaaatacattaaagatgatttaaaaaaaagaaaa

SEQ ID NO: 115 - DNA, 5206 bp, Homo sapiens
cccgccgcggaggccgagcgagcccccagcccagcctggcgactggggaccccggcacatgaggtggacgcccccggggaagacttgggtgcacagccaggcgagaaggtcttgagtcagacagagcaccagccttggggaccctggaccactatcatggagactgagagcgagcagaactccaattccaccaatgggagttctagctcagggggcagctctcggccccagatagctcaaatgtcactttatgaacgacaagcagtgcaggctctgcaagcactgcagcggcagcccaatgcagctcagtatttccaccagttcatgctccagcagcagctcagtaatgcccagctgcatagcctggctgccgtccagcaggccacaattgctgccagtcggcaggccagctccccaaacaccagcactacacagcagcagactaccaccacccaggcctcgatcaatctggccaccacatcggccgcccagctcatcagccgatcccagagtgtgagctctcccagtgctaccaccttgacccaatctgtgctactggggaacaccacctccccacccctcaaccagtctcaggcccagatgtatctacggccacagctgggaaacctattgcaggtaaaccgaaccctgggtcggaatgtgcctctagcctcccaactcatcctgatgcctaatggggcggtggctgcagtccagcaggaggtgccatctgctcagtctcctggagttcatgcagatgcagatcaggttcagaacttggcagtaaggaatcaacaggcctcagctcaaggacctcagatgcaaggctccactcagaaggccattcctccaggagcctcccctgtctctagcctctcccaggcctctagccaggccctagcggtggcacaggcttcctctggggccacaaaccagtccctcaaccttagtcaagctggtggaggcagtgggaatagcatcccagggtccatgggtccaggtggaggtgggcaggcacatggtggtttgggtcagttgccttcctcaggaatgggtggtgggagctgtcccagaaagggtacaggagtggtgcagcccttgcctgcagcccaaacagtgactgtgagccagggcagccagacagaggcagaaagtgcagcagccaagaaggcagaagcagatgggagtggccagcagaatgtgggcatgaacctgacacggacagccacacctgcgcccagccagacacttattagctcagccacctacacacagatccagccccattcactgattcagcaacagcaacagatccacctccagcagaaacaggtggtgatccagcagcagattgccatccaccaccagcagcagttccagcaccggcagtcccagctccttcacacagctacacacctccagttggcgcagcagcagcagcagcaacaacagcaacagcagcaacagcagcagccgcaagccaccaccctcactgcccctcagccaccacaggtcccacctactcagcaggtcccaccttcccagtcccagcagcaagcccaaaccctggtcgttcagcccatgcttcagtcttcacccttgtctcttccacctgatgcagcccctaagccaccaattcccatccaatccaaaccacctgtagcacctatcaagccgcctcagttaggggccgctaagatgtcagctgcccagcaaccaccaccccatatccctgtgcaagttgtaggcactcgacagccaggtacagcccaggcacaggctttggggttggcacagctggcagctgctgtacctacttcccgggggatgccaggtacagtgcagtctggtcaggcccatttggcctcctcgccaccttcatcccaggctcctggtgcactgcaggagtgccctcccacattggcccctgggatgacccttgctcctgtgcaggggacagcacatgtggtaaagggtggggctaccacctcctcacctgttgtagcccaggtccctgctgccttctatatgcagtctgtgcacttgccgggtaaaccccagacattggctgtcaaacgcaaggctgactctgaggaggagagagatgatgtctccacattgggttcaatgcttcctgccaaggcatctccagtagcagaaagcccaaaagtcatggacgagaagagcagtcttggagaaaaagctgaatcagtggctaatgtgaatgctaatactccaagcagtgaactagtagccttgacccccgccccttcagtaccgcctcctacactagccatggtgtctagacaaatgggtgactcaaaacccccacaggccatcgtgaagccccagattctcacccacatcattgaaggctttgttatccaggaaggagcagaacctttcccggtgggttgttctcagttactgaaggagtctgagaagccactacagactggccttccgacagggctgactgagaatcagtcaggtggccctttgggagtggacagcccatctgctgagttagataagaaggcgaatctcctgaagtgcgagtactgtgggaagtacgcccccgcagagcagtttcgtggctctaagaggttctgctccatgacttgcgctaagaggtacaatgtgagctgtagccatcagttccggctgaagaggaaaaaaatgaaagagtttcaagaagccaactatgctcgcgttcgcaggcgtggaccccgccgcagctcctctgacattgcccgtgccaagattcagggcaagtgccaccggggtcaagaagactctagccggggttcagataattccagttatgatgaagcactctctccaacatctcctgggcctttatcagtaagagctgggcatggagaacgtgacctggggaatcccaatacagctccacctacaccggaattacatggcatcaaccctgtgttcctgtccagtaatcccagccgttggagtgtagaggaggtgtacgagtttattgcttctctccaaggctgccaagagattgcagaggaatttcgctcacaggagattgatggacaggcccttttattacttaaagaagaacatcttatgagtgccatgaacatcaagctgggccctgccctcaagatctgcgccaagataaatgtcctcaaggagacctaaggtggccctcttgcacaaaccagcctaaggcagacactctccactgtccaggttataacctggtaccagcagactttgcagggaagaaagagttgttccaatcatgtaaccttctgtaggggattactgagacagggaagagaagtgcaagaattggttgctggtgctacatggcggcagctttgacattttctctgggttctactttattttttaaaatctttacagttctcaccatttcacgtaccttaatccaatctttataaaagaggcagtctagagaactaggactgctcagccttatcctggagtggagcatttagcccaggtcttaattctccaagaggaggaatacatagtatggtaaggcaaggaactgggtggaatgtcaggttgcctgcccaatgggagaggtagggtttttctagcttgtgtgacagaagtagcaaaatctggtcctcccccctcccagtgtagctgtggctcagagttttttctttttgttgtcacttactcccttgtgattgaattttttctcctgcatccatggcaggatccccagccagtatagagacttggttggcatcttctgctgcagggactaaaagtatttgactggggcacatgtggctgttgtcattctttctgcatcccactgttcccctccaatttatgttattttctaccctgtttttcagttccatctctgctctgtcctatagctttataaaaccagagtgtgtggggctgaggtcaggagtataagtacctgccttaggcactattccttatataacaaaaatattaaatatttttttcctcagtaaaaggatgaaaattggtttcagttgtcttactctattccagtctttgcccactttcacacaaatgacaaggccaatatgttttgtttgttttttaatcattaagagtttttgtacaaaaggtgatggttttttttcttcattttaaaacaccagggtgtgggggagggatgcaaacaaataacaaaaaagatgcttttgtaacattattttccctgtttagaaagaaaaaaatcactccaatagtattgaaaagtccaaagatgaaatagtttcattttcttttcctaaggcttataaaaggccccctgcctgttgattccatccctcttttgtgtccagtggagccatgttactcttcagtggcccaggggttcactattaaagaaagatcagtccaggtttctgggcacatggcctaaacaggaagatggaagcatcagaggattaaaaacctttccccacagaaatgtgggcaagaagacacttccctgagccagcagaagggacaggtgcagcagcattccacacccagcgcagaggacagcagagccctcgatgtcccacttctgcttccgttccctttctagaagattgaaaaaaaggtcaaaaccacatgcctgtggagaaagtgcgacatgtttagaaatactggtagggaaccaggagtaagaaaagctttaccagcttttactacaaatggatgaaagacatcaggatcccaccaccgcaaggtaaagtgacttcccttttctggaacccctgtggcacaggagtaccaattttcctttccaacgaactggatttctggataggcattttggctgtatgtggacagataagaccacagtccttagcccaatcccagctatacagtcaccccaatttccacaaatgatgtgatggtaccgtataatcctgtaattgggaaatttcacatttttcctgtcctaatctcagaggtgggagaagcaagtctagaacatctccaggctcagactaaacgagagtacttggactgcaaccaagtaatcactgcaaagtagttccaagcagcaagaaataccagattctcatggaggctactatagggtacagaataacaacatgaaagcaatcaaccctgtataaataatgtttcttggcattttttttttaattaaagaaatccagtgtctcaaaaaaaaaaaaaaaaaaaaaaaaaaaaaaaa

SEQ ID NO: 116 - DNA, 3873 bp, Homo sapiens
catctgcctgcccttctgccatccgagcgccctgactgcgccacactgcaggccatggagaatgagctgccagtcccacatacatctagcagtgcctgtgccaccagcagtaccagcggggccagtagcagcagtggctgcaacaacagcagcagtggtggaagtggccgccccaccgggccccagatttctgtgtacagtggtattccagaccggcagaccgtgcaggtgatccagcaggccctgcacagacagcccagcacggccgctcagtacctgcagcagatgtacgccgcccagcagcagcacctcatgctgcagaccgcggcgctccagcagcagcacctcagcagcgcccagctccagagcctggcagccgtacagcaggcaagcctggtatccaatagacaaggaagcacttcaggcagcaatgtgtctgcgcaggccccggcccagtcatcttcgatcaacctggcagcctccccagcagcagcccagctcctcaaccgggcccagagtgtgaactctgcagcagcctcaggcatcgctcagcaggctgtgctcttgggcaacacgtcttccccagccctgactgcaagccaagcacagatgtatctgagggcacagatgctcatcttcacgcccacggccaccgtcgctactgtgcagcctgagctcggcactggctcccccgcccggccccccacccccgcccaggtacagaacttgaccctccgaacacagcagacaccagcggcagcagcctcgggccccacccccactcagcctgtcctgcccagcttggccctgaaacccacgccgggcggtagccagcctctgcctaccccagcacagagcagaaatactgctcaggcttcccctgcaggtgccaagcctggcatagctgacagtgtgatggagccacacaagaaaggagatggcaacagcagtgtgccagggagcatggaaggccgggctgggctcagccggacggttcctgctgtggctgcccaccccctcattgcaccagcctatgctcagctgcagccacaccagctcctcccacagccatcctcaaagcacctgcagccccaatttgtgatccagcagcagccacagccacaacagcagcagccgccgccccagcagtcacggcctgtgctccaagctgagccccacccccagctcgcctcagtctctccaagcgtggccctccagcccagctcagaggcccatgccatgccactaggcccggttacacccgccctgccactccagtgtcccactgccaacctgcacaagcctggcggcagtcagcagtgtcaccctcccacacctgatactgggcctcagaatggacatcccgagggcgtgccccacacccctcaacgcaggttccagcacacttcagctgtcatcttacaactgcagcctgcttcaccaccccagcagtgtgtccctgatgactggaaagaagtggcaccaggggagaaaagtgtgcctgagacgcggtctggcccatcaccacatcagcaggctattgtcactgccatgcctggtggcctgcctgtacccacgagccctaacatccagccgtccccagctcacgagacagggcagggcattgttcatgcactgaccgacctcagcagccccggcatgacctcagggaacggaaactctgcctccagcatcgccggcactgccccccagaatggtgagaataaaccaccacaggccattgtgaaaccccaaatcctgacgcatgttatcgaagggtttgtgatccaggagggggcggagcctttcccggtgggacgctcgtccctgctggtggggaatctcaagaagaagtatgcacaggggttcctgcctgagaaacttccacagcaggatcacaccaccaccactgactcggagatggaggagccctatctgcaagaatccaaagaggagggtgctcccctcaaactcaagtgtgagctctgtggccgggtggactttgcctataagttcaagcgttccaagcgcttctgttccatggcttgtgcaaagaggtacaacgtgggatgcaccaaacgggtgggacttttccactcagaccggagcaagctgcagaaggcaggagctgcgacccacaaccgccgtcgggccagcaaagccagtctgccaccacttaccaaggataccaagaagcagccaacaggcactgtgcccctttcggttactgctgctttgcagctaacacacagccaggaagactccagccgttgctcagataactcaagctatgaggaacccttgtcacccatctcagccagctcatctacttcccgccggcgacaaggccagcgggacctggagctccccgacatgcatatgcgggacctggtgggcatgggacaccacttcctgccaagtgagcccaccaagtggaatgtagaagacgtctacgaattcatccgctctctgccaggctgccaggagatagcagaggaattccgtgcccaggaaatcgacgggcaagccctgctgctgctcaaggaggaccacctgatgagcgccatgaacatcaagctggggcccgccctgaagatctacgcccgcatcagcatgctcaaggactcctagggctggtggcagccaggattctggcccagggcgcctcctcccgactgagcagagccagacagacattcctgaggggcccagaaatggggccggttggagggcaggggctctccctaggggcatagctggtgaggaggtctgggcacctcctccatggctctcaggggcctttcatttctgtgggaggggcagagaggtaggtggcacagaagatggggctttatgcttgtaaatattgatagcactggcttcctccaaagtcccaatactctagccccgctctcttcccctctttctgtcccccattttccagggggtatatggtcagggctccccaacctgagttgggttacttcaagggcagccagcaggcctggatggaggcctagaaagcccttgccttccttcctcccacttctttctccaggcctggttaactcttccgttgtcagcttctcccccttcagcctgtttctgcagcagccagggttctcccccctacaccctctgcaggtggagagagagaagctgggcccagccgggccgtgcctgctggcacagacgccttaacgctgtgtgtatgactgtgtgactgtgtgggagcctggactgacagataggccaagggctactctctggcatctccaggtgttttgtagcaaacagccacttagtgctttgtcctggactccactcagcctcaggatggggaatagccaagaatggcagcctcagcgcagaggcaaggtcagaaagagacggcgcttcagagtttcctttccagacacccctccccgcactgtgaagttcccctgaccgccctcctggttcacaaagagcattaagaaagctgcggtggtctgagcaacatagcccaaagggctgagcctcctggcctgcctgcccgcccaccctgggagtcccagtggtgaggctcagagaactgctaaggggaaagaacagctggagtttctgttgatgtgaagaaggcagctcttggcctcccactcccacacttctttgcctataaatcttcctagcagcaatttgagctacctgaggaggaggcagggcagaaagggcgagggcctgcctctgacctgccgtgtcctttgcaggaaggaggtaggcacctttctgagcttattctattccccacccacacccccaggcagggttggaaatgaaggacttttttaacctttgttttgttttttaaaaataaatctgtaaaatctgtct

SEQ ID NO: 117 - DNA, 12687 bp, Homo sapiens
atgcgcagcccatgttagtgatggaggagagaagatggcggaagcggaatttaaggaccatagtacagctatggatactgaaccaaacccgggaacatcttctgtgtcaacaacaaccagcagtaccaccaccaccaccatcaccacttcctcctctcgaatgcagcagccacagatctctgtctacagtggttcagaccgacatgctgtacaggtaattcaacaggcattgcatcggccccccagctcagctgctcagtaccttcagcaaatgtatgcagcccaacaacagcacttgatgctgcatactgcagctcttcagcagcagcatttaagcagctcccagcttcagagccttgctgctgttcaggcaagtttgtccagtggaagaccatctacatctcccacaggaagtgtcacacagcagtcaagtatgtcccaaacgtctatcaacctctccacttctcctacacctgcacagttaataagccgttcccaggcttccagttctaccagcggcagtattacccaacagactatgttactagggagtacttcccctaccctaacggcaagccaagctcaaatgtatctccgagctcaaatgctgattttcacacccgctaccactgtggctgctgtacagtctgacattcctgttgtctcgtcgtcatcgtcatcttcctgtcagtctgcagctactcaggttcagaatttaacattacgcagccagaagttgggtgtattatctagctcacagaatggtccaccaaaaagcactagtcaaactcagtcattgacaatttgtcataacaaaacaacagtgaccagttctaaaatcagccaacgagatccttctccagaaagtaataagaaaggagagagcccaagcctggaatcacgaagcacagctgtcacccggacatcaagtattcaccagttaatagcaccagcttcatattctccaattcagcctcattctctaataaaacatcagcagattcctcttcattcaccaccttccaaagtttcccatcatcagctgatattacaacagcagcaacagcaaattcagccaatcacacttcagaattcaactcaagacccacccccatcccagcactgtataccactccagaaccatggccttcctccagctcccagtaatgcccagtcacagcattgttcaccgattcagagtcatccctctcctttaacagtgtctcctaatcagtcacagtcagcacagcagtctgtagtggtgtctcctccaccacctcattcaccaagtcagtctcctactataattattcatccacaagcacttattcagccacaccctcttgtgtcatcagctctccagccagggccaaatttgcagcagtccactgctaatcaggtgcaagctacagcacagttgaatcttccatcccatcttccacttccagcttcccctgttgtacacattggcccagttcagcagtctgccttggtatccccaggccagcagattgtctctccatcacaccagcaatattcatccctgcagtcctctccaatcccaattgcaagtcctccacagatgtcgacatctcctccagctcagattccaccactgcccttgcagtctatgcagtctttacaagtgcagcctgaaattctgtcccagggccaggttttggtgcagaatgctttggtgtcagaagaggaacttccagctgcagaagctttggtccagttgccatttcagactcttcctcctccacagactgttgcggtaaacctacaagtgcaaccaccagcacctgttgatccaccagtggtttatcaggtagaagatgtgtgtgaagaagaaatgccagaagagtcagatgaatgtgtccggatggatagaaccccaccaccacccactttgtctccagcagctataacagtggggagaggagaagatttgacttctgaacatcctttgttagagcaagtggaattacctgctgtggcatcagtcagtgcttcagtaattaaatctccatcagatccctcacatgtttctgttccaccacctccattgttacttccagctgccaccacaaggagtaacagtacatctatgcacagtagcattcccagtatagagaacaaacctccacaggctattgttaaaccacagatcctaacccatgttattgaaggctttgtgattcaggagggattggagccatttcctgtgagtcgttcctctttgctaatagaacagcctgtgaaaaaacggcctcttttggataatcaggtgataaattcagtgtgtgttcagccagagctacagaataatacaaaacatgcggataattcatctgacacagagatggaagacatgattgctgaagagacattagaagaaatggacagtgagttgctcaagtgtgaattctgtgggaaaatgggatatgctaatgaatttttgcggtcaaaacgattctgcactatgtcatgtgccaaaaggtacaatgttagctgttctaaaaaatttgcacttagtcgttggaatcgtaagcctgataatcaaagtcttgggcatcgtggccgtcgtccaagtggccctgatggggcagcgagagaacatatccttaggcagcttccaattacttatccatctgcagaagaagacttggcttctcatgaagattctgtgccatctgctatgacaactcgtctgcgcaggcagagcgagcgggaaagagaacgtgagcttcgggatgtgagaattcggaaaatgcctgagaacagtgacttgctaccagttgcacaaacagagccatctatatggacagttgatgatgtctgggccttcatccattctttgcctggctgccaggatatcgcagatgaattcagagcacaggagattgatggacaggcccttctcttgctgaaagaagaccatctcatgagtgcaatgaatatcaagctaggcccagccctgaagatctgtgcacgcatcaactctctgaaggaatcttaacaggaacatgaagccttgataaaacagcagttttacttttctcacaaaaacttgtaaggtaaaggcctaacttggtctagaatatgacacttattgtggtggatagccaagcacattgggatctccacatcaaatactgacatttcttctacaggtataataattcatcatgcattttcataattaataaacattggtaaaattaattttacaggttacatgaaacattgaaagacttgttacagagggccatgatatttttcaaagaaatgtgttatactagataatttttttaaaggtgatgtttatcattaatataaagaatccttttaaaagtaatttaatgatttacatttctcctcttttgattcaattttcttatacattttttctaccctattagttttctaaaggttgtcatgagaggtatattatggaataatttagtagtccagtgacagaatcgtatgaaatcagtgtacattttaaaaaacatgtcttttagacatatgctttatctataaaaaaggaattgtgttctagtatgaacaatactgatctggaagtgagaagagttagtttctattccaaacttgaccaagaatttggtttgactgagaacgttttcctctcagtttttgtacatttatttagagcagtggttctcagtggaggtcagttttgatcgccaggggacatctggcaatgttgagacattttggttgtcacagcttgggggtgggttcaggggagggttgctactggtgtctagtagttagaagccagagatgtttctaaacatcttataatgcacaggacagcacccctccactgtaaagaattattggttcaaaaatatcggtactgccaaggttgagaaactctgatatagaaggagtgataaatattgttttcacccaaaggaatacttttaaaggatgaagcttactaaacatatatgatggaagtattattcagataacattaatattctgctgaataattttttctagtttaatcatactagaaaaagaaaaaaaatctacaaattgtcctataaaataaggacaaacatgcaaataatttaactctcagaaagtactaattcattctgattatctttcatacctctgtgctcctctgcactgacgaagacataatatgattatacctatgaactagtgcacagccttttctggcaagaaaatagtttgtagcagatacgtggttgctctttggatttttttctattgttgaacatgctgggactagctagaatgcacattcctacttcctttaccaaacgtttgcatgcttcctgcaaagcacttaccaagtgatttctcttgaaccatcggatataattttgtatgtacatgtttgaggaaaaaaatgtaaagcaaaaccttttactgaacagtgttctatagaattatgacactaaaacaaaattgtttgtggaagccctgaaagctttatagtcctggacatcaaaaattttatttgagatgatgaatgttttgttttcatcttttcttatattaccacaattgagatattttagtaattgaaggaacatacacagatatttggcagaagtcgagtaaggaggggaaaaaaagagtccgtgagtttcagtcattttcactgctcttttcaaaaagattgtgttgagctggtagaagactaaagatgtcactgaagacatcacagatactatatttatcttttggctttgtgtacattagagaatgttgattatttttatacaaaaatacagcgggtaatttttttaatctttagatgcctcttgtttgaatgtatgctttgtggaattctttgtgtagtaatgttttaaaaaaagatgtttactgatagttacatgtaggattagaatatgtaatataatataaggctcatgttccagacctacgatagcttgtagtctatgttacgtatttctttatatcacatttttaatcattggattaaagtatcaaggaaagctaggtactctataatgagttttcatttattagcagttaatcatcatgacagaattgtcatatgcttgacttttccctcttcttggaatttcagaacacaaatacaggctaagcattagtaagagatggcccacagtatgagagagagaggtgcaacggaaaatctcgcctggaattaaaacttttcatagattatccacggttaatacaaaatttattatatggggatagactgctccagcaataatgattacatcctataactgtattacctatggcctttaaggtatcaattttgaactgtgttgtaggctctccttttatttgttctctttcctaatagcagccattctgtacttattgaaagcccctgtgcctactgctgtcttaagtattcaggaggggcttacaagagggttttctattggagaataccgtataatcttaaatctagtccagatctctgttgtccccactcaaaacatacacaaaatatgcacttgcttttttcaagtgagtttttatttaaaaatggcttgtttgctatcacattggtgcagctgtttctttcaagatgagttaatcatcttaatttcaaagcttcagctatatataatggatatatagacaacactgagcatccacctctctcctgagctttaaagcagagtttcagtatgatataggtggggagagtaaattgttttcatatcctttcatactactactaatagttttaggattttgactggggagagataatgacaaacagaaagggaacatggaggttcttcctacttttgctacctaagtttgcattttctgacttccttgcagtgttgcactctttgtcccattgggataaaaagcataagtttgaaattttgctttaagccttgtgttcctggggaagttaaacaactaagagagctgatttgtaaaaattattttttatatgacattaatattcatcaagccttgtgtaggcatgtgtaagacacagctatgcagctttgagtagtcaatatagtatgagatagagtgttgtcccaaatcctcctgtcactttttaagtagcatattatttccctgatggtcctgttactttgctgttgaatgctctaaacagaactttttaaaaggtgtgttttaagagcagtcacctaggagtagacaaggtggaatgggaggagagaaatggtaatgcaaaagcttgagcatgggaagagtcagaggaggaggccatcatccttgttagcttagcctacttcaacactgagcacatttctgcacttttgaagtgaaattcatgttttacttagaagaaataattttctttcattagggatcccagttgatttttgtttcctggtgtatcaaaatacttagaactatgaaacaagtattattgtgatcatgcctttgaataatttttgacgtagcttatcttcatgtatcaagtataaaattataatgagacatctattcacaaatacaagtcttagattgaattgaaatgtgttatagtgccctgtctcccactgacttgttcagttaaatgtcttaaagtacattatgtacatcttcaggcttttggtaccacaatggcacaagtatggtagggaggcaatatagtcttaggctatatgcctatattaagtgtgtataaacaatttttgaaagaatacactattatagatgtatgtgagtgatgctgacctgacagccatatccagtggatgaaactgactggacacactgttaaaatgttttaaagatgtattttcagccagaacagcctggttatagtttgtggttttcaccttggtggattgcaggaacacatgcagcctactggcattgagcattagctaatggcatgaaagggcctcatctcactacctctctaaggcctctagctccaagaaaaccatgaaaacttctttcttggagagatctttgtctcagaatccttagagaggatttcgtatgggggctaactttaggaagggaggcagctggggcaggactttctgatacctgacagtcatgttccagagcaacctttgggcagtggaaactggcgcatctatgcaaaatgattgctcaatctctatcttgtgtactacatatgtaactagctgggccctaaggaaggttttctagggggaaggatagggaagtagaggaggagacaagtaggaggaacaaagcattctagacccaagaggatagaagatatttaggatagatatggctttcatccatagttcaaaataatgcgttttgttagatgccagttatagcagtaaataggttatagtttttatatgtcaagatttacctgtaatcagactcattctttcactctctatacccactgtctccatgcttgggagcatggatattaatagttccagtgatgtagaagttagtgatttttgatttctgaaaaaggtgagaaccttttattacagttggagaatatttgtcaaaaattcaaaggttgttgtaattgagttgccagaattacagagtttccattttcagatatcacagttgaatcacctctgtagattgttataaagagaggcattttaagatagtattttatttgctaggttgtgtctcagtctaagaattgggaaaagaagagctataggtttctctttcctagtctggatttcagtaaacacaagcctacctctgcttctttggttcacagcagtgtggatcatgaaatgaactgtttacccacattcatcaatattggtattttacaaatctacttggagcatttaatttcatctcaaagattgtgatccactttagataagcacaaatacagtattaggaaaagtaaatatgcaatcttactaaaatttcaacttgttaagctgtatatcttaaaagaaattatttggggctgggcatggtggctcacacctgtaatcccagcactttgggaggctgaggtgggtagatcacctgaggtcaggagttcgagaccagcctgaccaatatggtgaaaccctatctctactaaaaacacaaaaattagctgggtgtggtggcatgcacctgtaattccagctacttgggaggctgagacaggagaattgcttgaacccaggtggtggaggttgcagtgagccaagatcacacccctgcactccagcctgggtgacagagcgagactccatctcaaaaaaacaaaacaaaaaattatttgggaagatacgtcctcttttattagaagttcataaaatgtatcatatagttttgttcacagtagttatataagctttcttcaaataaatttaaaattagattaccttctttggaaaaagaatttcctaaatttttaagaattttcaaagttttacatattagtttttagaacctaatccgttttaaaattgtactatgagaaagcttttttttgaaagttgtaaagcattaatacaaataatacaaatataattattaccatcacattccagagaatatggctttttctaaactttcaatttagaaaacatacattaagggagaatctctgccctccttttcagctctgaagatcagcttttctactcagacacatgcacacaccccttccaagtgtcatgtttatgggaacatttgggaaatgttttccagatgttttattttttcccttttatagtttgttgacatttaattttacttaaagatgacaattttaatcggaaatgttagaggtacaacatagtgaggttctagctagctttatacttttgaaaaatatttttgtttctactgctttttacaagtactagtcctctcagtgatactggtggtgttcagtatgaatccatagaaagaaaacaaaatttgttgtttaaaaaaagcagagtaatgaatgaatttcagttttgaaaacaacataatttgaaaacactgttatactaacatggcaaggtgttaattaaatataagagtaaggtagtaagttcttttagagcacctgtttaaatttactccagtaatcatcttaaggattgatagtcaccatcacttattggcttaaaagttatatttcatggaatattatcagtgttaaatccaagctttgtggagctttaagtgatggtggtgaaaaagttggtgtttatgagagagtggtggggtgtctagtcattagtgaagttaaacatcaacctgttttagaaagaattttttagtcttgcctaaagtaaaccagaagtgtctagtgtttaaatctttatttagaatgcttctcttaaaagtattttttgttttgggtagtattaaataatcagtaaataatctatttcagtagtaaataatgaattaagatgatgatgaatgaggattaacacactggtctggagactggggttttatttcagtgggttagctgtgtgtgacatgttgggcaattactcagctgttttaacagcttccagatatgcagtatggtgcctgtactactcaaaagttgattttggtttaattcatctttaaggtacctcccagctctaaaactatgattctaggctgtgtaatggggttattcctactttattctctttccttttttaagggttcattttatacttaataagcatccatttcttgggtcacctacagtctttgttctcctaaggattaaaatagaaaattcatacataacaagcaaatgatgacattttcctaaatgctccttattggttaaccactgaatatatgaacacatatgaatattgtcattcatgtacttaaattcatttagcaaactatttgaacacttacatgtgcagtgtttggtgaacatgacatgaggaactagtagtaagtaaaatcttccccccaaaattcattgtggcttaaataaatatgaacataatcattactacttaatatactgagagggaatcttaataaacttggaactgggagggaatatttgtatacattgggtaaagggttaggctagatgacatctaaggggtctgagtgaatcatatcataatttttataacacatttcacatactaaacatcagttggccccatacctgattaagttacaaaatttaggagacttaacattaaggacttacaggttgagacagcccgtatttcacaacattattttgacacttgactctattccagagttgttgctatacaaggcatgtggcagaacaaaaaaaaagctggtgttgatataagagctttttacccagtattgacagtgagcaactttctttctttttttttttttttcttttttttttttttgagatgggttcgctctgttgcccaggctggtgtgcagtggtgcgatctcagctcactgcaacctccacctcccgggttgaagcgattgtcttgcctcagccttccaagtagctggaattacaggtgcccgccgccacacctggctaatttttgtatttttagtagagacggggcttcaccatgttggccaggctagtctcgaactcttgacctcaagtgatccacctgccttggcctccctaagtgctgggattacaggcatgagccaccacacctgtccgacagtgtagcaactttctaaaactgaaaaatctcaaaggagatcattggaactgacttgttcatttattttttgtttttaaattaagaaagattacacaaaataagtgttactgtactttaagctattacaaatatccaacttttaaagatatgtaagaatcagtaatattctagaaagcacatatatagtaaaagggcatcctttaaatgtagaacgggtaaacatgaaacagttccatgcttgaattgttaagtatctagggggtaaacattgaatgggagaatcatttattgggttaaggtcccttccttgtcattctgggatctgtgaatcacattgtaattcctgttgacaaagctttacttgttaacatcagttgatactgacattctccataaagatatagaatgaaaatatctattaaaaatagtttatcattgttttagcttttttgttttgtttgttttgagacagagtctcactgtcacccaggcttgagtgcagcggtgtgatcttggctcaatgcaacctccacctcccaggttcaatagattctcccaccttggcctcccaagtagctgggattactggcatgcaccactatgcctggccagttttttgtatttttagtagagatggggtttcaccatgttggccaggctggactcgaactcctgacctcaagtgatccgcccacctcagcctcccaaagtgccgggattataggcatgagccactgcgcctagcctgttgcagctttttaaagcaggaaaatatccatataaactgttgggttagaatctatattagaatctttcaaactaattgaaaacaggaagactatcatctaagtagccagataatctgggtttcaaaaagttattccatggtactggtttaaaaaatacttttcaagtgttttaatttttaaagtgtaactaattcttcaaatatgttatgctgttaaaatatgtattccataagtactttttgtatatgtattcttaaattttaaaaagtcaactgaatgcgcaaagatgatataattttggatgtagacatttaaactagattcccagtcctctccttcaaaagcttggtctttgtttttcctatagggaaaaaagtcaaaataagttccaaaaactatcctcaaagtagtattgtgcttgtagtaaatgaaggttggatggatggatactgacaatggtggcaggcatttcaagccttttaaattagtactttttgtcgtcttgcttattaaaattttgttaattttagcaaagaccaattgttgtgataaactggtgttttttggatgcttcaagcacacgttaaccaattttttaattccccttttggttcctcccattgttctaaaataggactttcatattattaaaacctcaaaagatgatccacccaggatgaacaaagatcaccaaggggaaagaaaacattttttatctttacagaaaacatgttaagattatatatagatgtattctttacattggatattgtattagagtcctccttacaagaaatgaaatagtttttagcactcttagcattagagttcctagattggtgttgatagctacagttttaaaatgtataacctgaaaatgaaggttaattttgcattgtaagagcacatttgatctatgtaaaaagtgtccatttggtgtatttttttaaaaaagagaaagcactttcatattaagtagcatgtgtatgaatttagattttcatatttgttgtgtctgtattcagtgaagtaaattgagcatttaaatgtttgttgatggcaacattaactattaaattaaagcaccttatactctgctgcttaacttgcttgtaattgcacctttgttacctgcacattttcatatagaatattgttgtaacattgcttcatgtgggtctggatggaagattagtgggcctacaggatcatttatttatattgtttatattacaataatatattgtagatcagttgtaagttcatttctttacaaataaaagcctcttccatttgactggaaaaaaaaaaaaaaa

SEQ ID NO: 118 - DNA, 3435 bp, Homo sapiens
acagcaactatgaaataatcgtagtatgagaggcagagatcggggcgagacaatggggatgtgggcgcgggagccccgttccggcttagcagcacctcccagccccgcagaataaaaccgatcgcgccccctccgcgcgcgccctcccccgagtgcggagcgggaggaggcggcggcggccgaggaggaggaggaggaggccccggaggaggaggcgttggaggtcgaggcggaggcggaggaggaggaggccgaggcgccggaggaggccgaggcgccggagcaggaggaggccggccggaggcggcatgagacgagcgtggcggccgcggctgctcggggccgcgctggttgcccattgacagcggcgtctgcagctcgcttcaagatggccgcttggctcgcattcattttctgctgaacgacttttaactttcattgtcttttccgcccgcttcgatcgcctcgcgccggctgctctttccgggattttttatcaagcagaaatgcatcgaacaacgagaatcaagatcactgagctaaatccccacctgatgtgtgtgctttgtggagggtacttcattgatgccacaaccataatagaatgtctacattccttctgtaaaacgtgtattgttcgttacctggagaccagcaagtattgtcctatttgtgatgtccaagttcacaagaccagaccactactgaatataaggtcagataaaactctccaagatattgtatacaaattagttccagggcttttcaaaaatgaaatgaagagaagaagggatttttatgcagctcatccttctgctgatgctgccaatggctctaatgaagatagaggagaggttgcagatgaagataagagaattataactgatgatgagataataagcttatccattgaattctttgaccagaacagattggatcggaaagtaaacaaagacaaagagaaatctaaggaggaggtgaatgataaaagatacttacgatgcccagcagcaatgactgtgatgcacttaagaaagtttctcagaagtaaaatggacatacctaatactttccagattgatgtcatgtatgaggaggaacctttaaaggattattatacactaatggatattgcctacatttatacctggagaaggaatggtccacttccattgaaatacagagttcgacctacttgtaaaagaatgaagatcagtcaccagagagatggactgacaaatgctggagaactggaaagtgactctgggagtgacaaggccaacagcccagcaggaggtattccctccacctcttcttgtttgcctagccccagtactccagtgcagtctcctcatccacagtttcctcacatttccagtactatgaatggaaccagcaacagccccagcggtaaccaccaatcttcttttgccaatagacctcgaaaatcatcagtaaatgggtcatcagcaacttcttctggttgatacctgagactgttaaggaaaaaaattttaaacccctgatttatatagatatcttcatgccattacagctttctagatgctaatacatgtgactatcgtccaatttgctttcttttgtagtgacattaaatttggctataaaagatggactacatgtgatactcctatggacgttaattgaaaagaaagattgttgttataaagaattggtttcttggaaagcaggcaagactttttctctgtgttaggaaagatgggaaatggtttctgtaaccattgtttggatttggaagtactctgcagtggacataagcattgggccatagtttgttaatctcaactaacgcctacattacattctccttgatcgttcttgttattacgctgttttgtgaacctgtagaaaacaagtgctttttatcttgaaattcaaccaacggaaagaatatgcatagaataatgcattctatgtagccatgtcactgtgaataacgatttcttgcatatttagccattttgattcctgtttgatttatacttctctgttgctacgcaaaaccgatcaaagaaaagtgaacttcagttttacaatctgtatgcctaaaagcgggtactaccgtttattttactgacttgtttaaatgattcgcttttgtaagaatcagatggcattatgcttgttgtacaatgccatattggtatatgacataacaggaaacagtattgtatgatatatttataaatgctataaagaaatattgtgtttcatgcattcagaaatgattgttaaaattctcccaactggttcgacctttgcagatacccataacctatgttgagccttgcttaccagcaaagaatatttttaatgtggatatctaattctaaagtctgttccattagaagcaattggcacatctttctatactttatatacttttctccagtaatacatgtttactttaaagattgttgcagtgaagaaaaacctttaactgagaaatatggaaaccgtcttaattttccattggctatgatggaattaatattgtattttaaaaatgcatattgatcactataattctaaaacaattttttaaataaaccagcaggttgctaaaagaaggcattttatctaaagttattttaataggtggtatagcagtaattttaaatttaagagttgcttttacagttaacaatggaatatgccttctctgctatgtctgaaaatagaagctatttattatgagcttctacaggtatttttaaatagagcaagcatgttgaatttaaaatatgaataaccccacccaacaattttcagtttattttttgctttggtcgaacttggtgtgtgttcatcacccatcagttatttgtgagggtgtttattctatatgaatattgtttcatgtttgtatgggaaaattgtagctaaacatttcattgtccccagtctgcaaaagaagcacaattctattgctttgtcttgcttatagtcattaaatcattacttttacatatattgctgttacttctgctttctttaaaaatatagtaaaggatgttttatgaagtcacaagatacatatatttttattttgacctaaatttgtacagtcccattgtaagtgttgtttctaattatagatgtaaaatgaaatttcatttgtaattggaaaaaatccaataaaaaggatattcatttagaaaatagctaagatctttaataaaaatttgatatgaaaagcacaatgtgcagaagttatggaaaacctatagaggattacaacaggtaaacgttaaagagaatacattgctgacttatagtgatgtggctaagaagtacatgctttgttgtaaaattgcttgaaagcccattgaaagatgtatctgtttatttacagtctttgaagtaaaagttaccaatgtttgccaataaaaa

SEQ ID NO: 119 - DNA, 2622 bp, Homo sapiens
tctcccctcccgccgcccgggcgagcgacacggctgcggcccccctcccctcccttccctccctccctcccatccccccctccccgagacccaccggaccccgaacccagatggccgaaacgggctccccgtcttaacgatttggcgtctccctcgaccaccacctctttgtgcagcagcccccgggcagaccctgttccgagggcaacgctccccagtccccccacccccgaccccggaatcatgcatcggactacacggatcaaaatcacagagctgaacccccacctcatgtgtgccctctgcggggggtacttcatcgacgccaccactatcgtggagtgcctgcattccttctgcaaaacctgcatcgtgcgctacctggagaccaacaaatactgccccatgtgtgacgtgcaggtccataaaacccggccgctgctgagcatcaggtctgacaaaacacttcaagacattgtctacaaattggtccctgggctttttaaagatgagatgaaacggcggcgggatttctatgcagcgtaccccctgacggaggtccccaacggctccaatgaggaccgcggcgaggtcttggagcaggagaagggggctctgagtgatgatgagattgtcagcctctccatcgaattctacgaaggtgccagggaccgggacgagaagaagggccccctggagaatggggatggggacaaagagaaaacaggggtgcgcttcctgcgatgcccagcagccatgaccgtcatgcatcttgccaagtttctccgcaacaagatggatgtgcccagcaagtacaaggtggaggttctgtacgaggacgagccactgaaggaatactacaccctcatggacatcgcctacatctacccctggcggcggaacgggcctctccccctcaagtaccgtgtccagccagcctgcaagcggctcaccctagccacggtgcccaccccctccgagggcaccaacaccagcggggcgtccgagtgtgagtcagtcagcgacaaggctcccagccctgccaccctgccagccacctcctcctccctgcccagcccagccaccccatcccatggctctcccagttcccatgggcctccagccacccaccctacctcccccactcccccttcgacagccagtggggccaccacagctgccaacgggggtagcttgaactgcctgcagacaccatcctccaccagcagggggcgcaagatgactgtcaacggcgctcccgtgccccccttaacttgaggccagggaccctctcccttcttccagccaagcctctccactccttccactttttctgggcccttttttccacctcttctactttccccagctcttcccaccttgggggtggggggcgggttttataaataaatatatatatatatgtacataggaaaaaccaaatatacatacttattttctatggaccaaccagattaatttaaatgccacaggaaacaaactttatgtgtgtgtgtatgtgtggaaaatggtgttcattttttttggggggggtcttgtgtaatttgctgtttttgggggtgcctggagatgaactggatgggccactggagtctcaataaagctctgcaccatcctcgctgtttcccaaggcaggtggtgtgttgggggccccttcagacccaaagctttaggcatgattccaactggctgcatataggagtcagttagaatcgtttctttctctccccgtttctctccccatcttggctgctgtcctgcctctgaccagtggccgccccccacgttgttgaatgtccagaaattgctaagaacagtgccttttacaaatgcagtttatccctggttctgaggagcaagtgcagggtggaggtggcacctgcatcacctcctcctcttgcagtggaaactttgtgcaaagaatagatagttctgcctctttttttttttttcctgtgtgtgtggcctttgcatcatttatcttgtggaaaagaagattcaggccctgagaggtctcagctcttggaggagggctaaggctttagcattgtgaagcgctgcacccccaccaaccttaccctcaccggggaaccctcactagcaggactggtggtggagtctcacctggggcctagagtggaagtgggggtgggttaacctcacacaagcacagatcccagactttgccagaggcaaacagccttccaattgcccctccacccccagctgaggcccggtcacctggtcaggacagagcaactgcatctaaaagcacaagaagacagaaacctgtaagctctgaccccacccccaccccttgagaggtcagcggaccacctccttagggacagaccctggcaggtcgctgcccaccgagatttcctcaagtgtgcatagatctgagaggagtcgggagtcgagactcgagattccatcatagcgtaggtgtgtggggttgggagccccctgatgggcttgtctgtgtttgcaccttgtcctgtgtctgaggtcctgtgactgtaccctcctttgccctgggacatctgtatctcttggctttgtaataaatgctgcatactttctaaaaaaaaaaaaaaaaaa

SEQ ID NO: 120 - DNA, 2248 bp, Homo sapiens
cgaactgtgatggcggcggccgcggtgatgggcccggcgcagatcctctgtggttgttgaattgtaacaagagagagaactctggctgcctgagagggcatgactctagtcacagcaggaggggcttggacaggccctggttgttggcatgaagtgaaggatgaagagtcatcttctgaacagagcatttctatagcagtgtcacatgttaatacttccaaggcaggtttgcccgcacagacggctctcccttgtgacatatgtggccccatcttgaaagatattttgcacctggatgaacaccagggtacacaccatggactgaaacttcacacatgtggggcatgtgggagacaattctggttcagtgcaaaccttcatcagtaccagaagtgttacagtatagagcaacccttaagaagggataaaagtgaggcctcaattgtgaagaactgcacagttagcaaagaacctcatccgtcagagaagccctttacgtgtaaggaggagcagaaaaacttccaggctactttgggtggctgccaacaaaaggccatccacagtaagaggaagacacacaggagcactgagagtggggatgcatttcatggtgaacaaatgcattacaagtgcagtgaatgtgggaaagctttcagccgcaaagacacacttgtccagcaccagagaattcatagtggagagaagccttatgagtgcagcgaatgtgggaaagccttcagccgcaaagctacacttgtccagcatcagagaatccatactggagaaaggccttatgaatgcagcgaatgtggaaaaaccttcagtcgaaaagacaaccttactcagcacaagagaatccacactggagaaatgccttataagtgcaatgaatgtgggaaatattttagccatcactccaatctaattgtacaccagagagttcacaatggagcaaggccttataagtgcagtgattgtgggaaagtcttcagacacaaatctacacttgttcagcatgagagtattcacactggagaaaatccttatgattgcagtgattgtgggaaatcctttggccacaaatacaccctcattaaacatcagcgaattcacactgagtcaaagccgtttgagtgcattgaatgcgggaaattctttagtcgaagttctgactatattgcacaccagagggttcacactggtgaaaggccttttgtgtgcagtaaatgtgggaaagactttatcagaacctcccaccttgttcgacaccaaagagttcacactggagaaaggccatatgagtgcagtgaatgtgggaaggcctacagcttaagctcccacctcaatcggcaccagaaagttcacactgcaggcaggctttaggagtgctttgaatacaacaggactcatcaatcagatgttgaatttcatgtatctgaacattgacacaaaggagataccttatggtgccaggtacgtgggaaccttctagggatatgttgcactttctgacttgctcaggttttttgccagagttatgtcactgtcaatccatgtggccgaaaccatcttaactctaccagctaagataccccagcattggggaaggcagggttttgtattgtccagtccctggagaaaatcatgaaatgcctgagttcattgggggtcctcattcccttctgtatgacaggtataggtatggatatgacccatttttagccaagagggtctgagctgtatctgctggtggcttatacaaaaagtttactttcttcatggatattcttggtctcacatacttgtaatcaagtttttccagcctccaagtcacctggcctgggaaagtacttgcctcatgttgctctggtttgtgataataaaggctttacagtttaagccacatttaatcttggggcttcttcttatggtctggggtggattgaaaacaggctctgccaaactgaagacagcctttgtgcggtgcctccaactttgcctcaaatgggacagtgggttgagggagaacagttcttagtccagttttgatgttaacttccatagctgacaaagcttgttaagtaagaattaagatcttgtgtagacctgatttgtctggattttagagttatttgagagcccatatttcaccttgaggagggtgctgctgctgtgacagcctgcagtgttttgaaacagcatggattgggtgtcttgtttgcagcatgtgtcccatgttccccaacac

SEQ ID NO: 121 - DNA, 1744 bp, Homo sapiens
cagcgcccgggccatggcggcggcggtggcgggagctgctgtctgagcagcggttgcggaccgagcgaacttggcccaggagcccgggcctagggagaggcgcggcggcggcgggagcgcgaacggctggagctggccttcttcgccttctcctcggctgtggagccctggtggggggtctgcgcccggtcaccatgacgacgccggcgaatgcccagaatgccagcaaaacgtgggaactgagtctgtatgagctgcaccggaccccgcaggaagccataatggatggcacagagattgctgtttcccctcggtcactgcattcagaactcatgtgccctatctgcctggacatgctgaagaatacgatgaccaccaaggagtgcctccacagattctgctctgactgcattgtcacagccctacggagcgggaacaaggagtgtcctacctgccgaaagaagctggtgtccaagcgatccctacggccagaccccaactttgatgccctgatctctaagatctatcctagccgggaggaatacgaggcccatcaagaccgagtgcttatccgcctgagccgcctgcacaaccagcaggcattgagctccagcattgaggaggggctacgcatgcaggccatgcacagggcccagcgtgtgaggcggccgataccagggtcagatcagaccacaacgatgagtgggggggaaggagagcccggggagggagaaggggatggagaagatgtgagctcagactccgcccctgactctgccccaggccctgctcccaagcgaccccgtggagggggcgcaggggggagcagtgtagggacagggggaggcggcactggtggggtgggtgggggtgccggttcggaagactctggtgaccggggagggactctgggagggggaacgctgggccccccaagccctcctggggcccccagccccccagagccaggtggagaaattgagctcgtgttccggccccaccccctgctcgtggagaagggagaatactgccagacgaggtatgtgaagacaactgggaatgccacagtggaccacctctccaagtacttggccctgcgcattgccctcgagcggaggcaacagcaggaagcaggggagccaggagggcctggagggggcgcctctgacaccggaggacctgatgggtgtggcggggagggtgggggtgccggaggaggtgacggtcctgaggagcctgctttgcccagcctggagggcgtcagtgaaaagcagtacaccatctacatcgcacctggaggcggggcgttcacgacgttgaatggctcgctgaccctggagctggtgaatgagaaattctggaaggtgtcccggccactggagctgtgctatgctcccaccaaggatccaaagtgaccccaccaggggacagccagaggaaggggaccatggggtatccctgtgtcctggtctatcaccccagcttctttgtcccccagtacccccagcccagccagccaataagaggacacaaatgaggacacgtggcttttatacaaagtatctatatgagattcttctatattgtacagagtggggcaaaacacgcccccatctgctgccttttctattgccctgcaacgtcccatctatacgaggtgttggagaaggtgaagaaccctcccattcacgcccgcctaccaacaacaaacgtgcttttttcctctttgaaacctgcaaaaaaa

SEQ ID NO: 122 - DNA, 3551 bp, Homo sapiens
gcgcctccgcccctcgctcgctcgctccttcccgccctccccgcagcgccggccgagccggcttcccctcagtctctcatgaatattgagcggcccctgttgtatttcccgagctccattgcggaagctgaggctcgccatattgtgcggcggcgccggcgtccgcggcagctgataccagagtcttgctccggccgcggccagcggagccctgggctggggcaggagccgcaatgtctcaggctgtgcagacaaacggaactcaaccattaagcaaaacatgggaactcagtttatatgagttacaacgaacacctcaggaggcaataacagatggcttagaaattgtggtttcacctcgaagtctacacagtgaattaatgtgcccaatttgtttggatatgttgaagaacaccatgactacaaaggagtgtttacatcgtttttgtgcagactgcatcatcacagcccttagaagtggcaacaaagaatgtcctacctgtcggaaaaaactagtttccaaaagatcactaaggccagacccaaactttgatgcactcatcagcaaaatttatccaagtcgtgatgagtatgaagctcatcaagagagagtattagccaggatcaacaagcacaataatcagcaagcactcagtcacagcattgaggaaggactgaagatacaggccatgaacagactgcagcgaggcaagaaacaacagattgaaaatggtagtggagcagaagataatggtgacagttcacactgcagtaatgcatccacacatagcaatcaggaagcaggccctagtaacaaacggaccaaaacatctgatgattctgggctagagcttgataataacaatgcagcaatggcaattgatccagtaatggatggtgctagtgaaattgaattagtattcaggcctcatcccacacttatggaaaaagatgacagtgcacagacgagatacataaagacttctggtaacgccactgttgatcacttatccaagtatctggctgtgaggttagctttagaagaacttcgaagcaaaggtgaatcaaaccagatgaaccttgatacagccagtgagaagcagtataccatttatatagcaacagccagtggccagttcactgtattaaatggctctttttctttggaattggtcagtgagaaatactggaaagtgaacaaacccatggaactttattacgcacctacaaaggagcacaaatgagcctttaaaaaccaattctgagactgaacttttttatagcctatttctttaatattaaagatgtactggcattacttttatggacagatcttggatatgttgttcaattttctttctgagccagactagtttacgctattcaaatcttttcccctttatttaagatttcctttttggaagggactgcaattattcagtatttttttctttcctttaaaaaaatatatctgaagtttcttgtgtttttttttttccccacaaagtgtgtttccacttggagcaccattttgacccaggaatttttcatagtttctgtattcttataagattcagttggctgtccttttcctgctcccctcaaaagatttttagtcatacagaatgttaaatattatgtattctgactttttttttcccccggagtcttgtatatttatagttttctatataaactgtagtatcttcatgaagacccaaggctcaaatttactgtccttaaaaacaattctcataggattattcttttcatggtattttcttccataatatctcattttaaaaagaagttctttatgaacttagtgtccattgtcatgcaatgtttttttttttccattctttttccctgtaattttggaatttctggtcctgggaagaatcaaacaaaatcttaagttctatgagaacttggttcattgacatattctgctgaagaaagaaaaattaaattggtagtaaaatatagtcttcaagtatacgtttgagagtgcttttttttgtattagttctgctgtcacttcatttcctgtattatatgtgatgtttttccccattaaaataccagagataatggagatattttgcactttagccttgatgaaaagtacaagatatgttcaaagcttccctaatttttttcttatttgtagccacataagtttcaagaataacatggcacacagaacaatggaaaaaagtttgtttccattggaaaattatatcattttgggttgccacatcagtttataaatttggcgctcttttaattacactctgtagaaggttaatagagcttgagccctgctttaatatgtagtgaaagataattctgtagaaaaacgtcagccagtagggtaaagtcattctactgttcttaatttttatattgaggaacaatattgggtgtttgggagccagaaagctttgttgacagatcagaaataagattgacttgggtgttatatttcatctctctccagactctaggtatatttccaactttatatatcacagtatttaaaaagacatgtttgcattgagaaattaaccctaaagggttttcaatagggtgtagacctccagtacctttgtaactaaagtctgtctagtcattgtaaatatttatctgtcagttttgacagattggggccagcttgatgttttaaatcttcagcccggtatgaaaacttaaaggtatatattcaattttttaccattttatggaaaatatttaaaatctgtttttacagggttttttttttttttttttttttgtaatctgtgccatgaaatttgaaaaccaccaaaaatcaagggaacttttatatattcaattccttttctggtgtaatgttaaagttgtatagattattaatgcatgcccactgaatataaccctggttttgtgataaaactgcttagattttgttgatgacattagattagtagttgcattaaataactaaattcccattgtgattaattgaaattttgtctttaagcagagagttatttgtgactataagctttgtgcttagagaatgtatgtgtttttatctgtcagtatgggaggatataaactgcatcattagtgaaattattggttgtgtaatcctttgtgaaatataattctaggtatttgatagggtattgagtgtattttgtgtgtgtgtggatgtgtgttttggggtacggggagaggcgatgctattggccatcactaccaaccagggtttcaaaaagtattacctaagtaatttcttttatcactatctcaactgaggaagaaaaggctcaccacaagtggtgtgaaggctttgggtacttagttctaaatttttttatggtaacatatacatagccacatttacagttttaaccattttaaggcatgtaattcagtggggttaggtacattcacaatgttgtgtaatgatcaccgctgtctacttgtaaaactttttcatcaccccaaacagaaactctgtgtgcaattaaagtaatgcatttctcttcttcttaacccct

SEQ ID NO: 123 - DNA, 2312 bp, Homo sapiens
ctccctcccccccgccgcctcctcctcctgccgctgccgctgctttggctgctgcgtcatacgccccagagccgccgggacggaggggctgggcctggggaccccccggcctccgcctgcacgcccccccacgcccggacgtgccctctccgcgcgggggactcgcctaggtctcctacgtctgcccctgcccggctcccggcggccccagctgtcaccggcccccccaggatgcaatggcgcagcccccccggctgagccgctctggtgcctcctcactttgggacccagcttctcctgctcccacctctggccccaggcctcggctttgggagggtcaagatgtgctggccagatggactgatgggctgctatacttgggtaccatcaaaaaggtggacagtgctagggaggtgtgtctggtccagtttgaggatgattcgcagtttctggttctatggaaagacattagccctgctgccctccctggagaggaactcctctgttgtgtctgtcgctctgagactgtggtccctgggaaccggctggtcagctgtgagaagtgtcgccatgcttatcaccaggactgccatgttcccagggctccagcccctggagagggagagggcacatcctgggtatgccgccagtgtgtctttgcgatcgccaccaagaggggaggtgccctgaagaagggcccctatgcccgggccatgctgggtatgaagctttctctgccatatggactgaaggggctggactgggatgctggacatctgagcaaccgacagcagagttactgttactgtggtggccctggggagtggaacctgaaaatgctgcagtgccggagctgcctgcagtggttccatgaggcctgcacccagtgtctgagcaagcccctcctctatggggacaggttctatgaatttgaatgctgtgtgtgtcgcgggggccctgagaaagtccggagactacagcttcgctgggtggatgtggcccatcttgtcctgtatcacctcagtgtttgctgtaagaagaaatactttgattttgatcgtgagatcctccccttcacttctgagaattgggacagtttgctcctgggggagctttcagacacccccaaaggagaacgttcttccaagctcctctctgctcttaacagccacaaggaccgtttcatttcagggagagagattaagaagaggaaatgtttgtttggtctccatgctcggatgcctccccctgtggagccccctactggagatggagcactcaccagcttcccttcagggcagggccctgggggaggggtctcacgtcccctggggaagcgccggaggccggagccagagcccctgaggaggaggcagaaggggaaagtggaggagctggggccaccctcagcagtgcgcaatcagcccgagccccaggagcagagggagcgggctcatctgcagagggcactgcaggcctcagtgtctccaccatcccccagccctaaccagagttaccagggcagcagcggctacaacttccggcccacagatgcccgctgcctgcccagcagccccatccggatgtttgcttccttccacccttctgccagcaccgcagggacctctggggacagtggacccccagacaggtcacccctggaacttcacattggtttccccacagacatccctaaaagtgccccccactcgatgactgcctcatcttcctcagtttcatccccatccccaggtcttcctagacgctcagcacccccttctcccctgtgccgtagtttgtctcctgggactgggggaggagtccgaggtggggttggttacctgtcccgaggggaccctgtccgggtccttgctcggagagtacggcctgatggctctgtgcagtacctggttgagtggggaggagggggcatcttctgaacagcctgcctctgcccagctccccattcacacacaccggcactttcataccctgacctctgacctcacctacagctgggatgtacctggagagatagggggtagttctccctactgcccaggctggaatccaagagtggggagtggggaagaggccctcttctctaccctccttcatgattcctgacccctcccatccttcccatttcctttgatgttattttgttacagctttttaaatattttttaaaattatttaacccctgggggcagagactgaggagggaggatgataagggatcccggactctgtatgattgaaataaagagaaataaacaaatctagcagctctgaaaaaaaaaaaaaaaaaa

SEQ ID NO: 124 - DNA, 4144 bp, Homo sapiens
gctgccattcggcaccggagtcgctccgcgctcccagaatgcaccggcagtccgcgggaaaccaaaatggcgaggggctgtattgaagtgggctgtgtttgaggccggtgtaagaacgctcattctacccccaacccttgtctccaaggacctcggtttgtgcgtgcatatgtgccgggtacccggtggggcgggtgcccagtaagtgctcggactcgcaggggaagcgcccacggggacggattggttgttttttcctgtatgaagcggttggcaccactgaagtgaccgaatgagagactctacaggggcaggtaattcactggtccacaagcggtctcctttacgtcgaaaccaaaagaccccaacatccttgaccaagctgtctttacaggatggacataaagccaaaaagccagcatgtaaatttgaagagggtcaggatgtcctagctagatggtcagatggcttgttttatcttggcactatcaaaaagataaacatattgaaacagagctgcttcatcatatttgaagacagttctaaatcctgggttctctggaaggacattcaaacaggagccactggaagtggggaaatggtctgtacaatatgtcaagaagagtattcagaagctcccaatgaaatggttatatgtgacaagtgtggccaaggatatcatcagttgtgtcacacacctcatattgattccagtgtgattgattcagatgaaaaatggctctgtcggcagtgtgtttttgcaacaacaacaaagaggggtggtgcacttaagaaaggaccaaatgccaaagcattgcaagtcatgaagcagacattaccctatagtgtggcagaccttgaatgggatgcaggtcataaaaccaatgtccagcagtgttactgctattgtggaggccctggagactggtatttgaagatgctacagtgctgcaaatgtaagcagtggtttcatgaggcttgtgtgcaatgccttcaaaagccaatgctatttggagacagattttatacgtttatatgctctgtctgcagttctggaccagaatacctcaaacgtctaccattacagtgggtagatatagcacacctatgcctttacaacctaagtgttattcataagaagaaatactttgattctgaacttgagcttatgacatacattaatgaaaactgggatagattgcaccctggagagctggcagacacaccaaaatctgaaagatatgagcatgttctggaggcattaaatgattacaagaccatgtttatgtctgggaaagaaataaagaagaagaagcatttgtttgggttgcgaattcgtgttcctcctgtgccaccaaatgtggctttcaaagcagagaaagaacctgaaggaacatctcatgaatttaaaattaaaggcagaaaggcatccaaacctatatctgattcaagggaagtaagcaatggcatagaaaaaaaaggaaagaaaaaatctgtaggtcgtccacctggcccatatacaagaaaaatgattcaaaaaactgctgagccacttttggataaggaatcaatttcagagaatcctactttggatttaccttgttctatagggagaactgagggaactgcacattcatccaatacctcagatgtggatttcacgggtgcttccagtgcaaaagaaactacctcgtctagcatttccaggcattatggattatctgactccagaaaaagaacgcgtacaggaagatcttggcctgctgcaataccacatttgcggagaagaagaggtcgtcttccaagaagagcactccagactcagaactcagaaattgtaaaagatgatgaaggcaaagaagattatcagtttgatgaactcaacacagagattctgaataacttagcagatcaggagttacaactcaatcatctaaagaactccattaccagttattttggtgctgcaggtagaatagcatgtggcgaaaaataccgagttttggcacgtcgggtgacacttgatggaaaggtgcagtatcttgtggaatgggaaggagcaactgcatcctgactgtaggactgaacattatgttcactgcactctgattttctgtaggtacagttcaaagccctaaaggagtctggcttttactatctttcttaaaaaaaaaaaaaagtcaaaaaaattcaaaaaaggggatgatactagccttaacatgtacctgtcaatgttatggatattgtcataaaaaggtatcttttaaaaatcagaacagagacttaattttttaaatcttaagatttgtagaatgtttctaggataggatattaaaaatgattgaaacccatgcatggtgttagacaatttttctaattattccattgagtcagttttttgtgattagtgattatcagagcaaacatcatgtagatagcacaagtatttggagaaacgttgtttgttttgttaccaaaatgttggaaaaatttatttcaataccttttagatttcataaagtgcagtgtatataatgcctactgaaagactgtaaaatattgaaattttctttcaagcaaagtgtaaaaaaatatattgagcctgtaaattgctctgtgactagacttcattgtcgtcttaatatattcttgcatgtgcatatatatacacacgtgtatatatatgtgtgtgattatgtgacctatgcaatacaaattatgggaatgggcagctttggagtatatatcccataattcttttttcaggaatagttgcagtatttacacagcagcatttcttctcaggcttttattgggtgctgttgcttgctatgtatgaagagaaatgtgtcagacaagtttagtgtgttctgaagaagggtgtgaacaacagtgttcatgggcttttagaatgcttttcacttttagtccttgtaactcagctgttcagtacctaaaacaaattcaaataatatgaacattatctcctactagaagtaacgttttcaagttttcatggcacattatgattgtaaatgtctctcatttttaacagtaagtctataggagtcccgtgaagattcctgaaatgtctgtagtaactgttagtcatgtttgaataagtgtagtatgaacaaagtattttattgcacagggttaacaaacagtatgttgccagctgaggctactgctgttttattacaacattacctcttgtttttataaagtgtaccaagatttaaattgataactttattttacttgtaaaaaaaaagtttcttttatcaccagtgttacagttgtcttctgtttctttttgttttgttttatttgttttcctttttagccaaagagtgaacagaagattttcttattttggtggctattcattttacttttaaaagtgattggtggattttagactaattatgggggaatttgccaccaaaataaaaaatatgtaaagtgtagtgattacagagtggttaaaatgtgggttagtacttatttattccattaattgattatttgactgtttataaagaaagttgctttatttctttaaacatcttcaaaagatgatcctttcttgtcacattatagccaaaagaagcagagaacttcattgtctgcatttggttcctggttggccaggtataaatgagctttacaaaagtgcaaattaaaaactgttacttctgtttacctccaccaaaacttgattttcccctagctattaatttaaggttgcctttcctgcagctgcaatattttgaataacacacagagtttgtgttgatttttgaatgtttgtttatatctaggggtaatgaaaaatgtaaatcccgtgtatccttattcactccacctgtatcatattatttcattttccccaaagtcctttaattctaactgaacaccagcagtatttttagaaatttttctttaacatacttggaagatgatttatccagctgaactgtctttagacgtaattattgtgaatgtctgttttattttctcatggtggttcacatggctctgatgttcagtttgtatttttggaattgctttacttagaaattaaaacagaccaacattaaatgtgtgtattttttaaagagctaaaaaaaaaaaaaaaaaa

SEQ ID NO: 125 - DNA, 4181 bp, Homo sapiens
accagtaagtcgtgtatttagcattcattcatcaaagcctccggatgcctcctacgtgccctgcactatgctggtcttggtaatccgtggtccctatcccagcgcccagtgtcaggggaagctgatggagaatcgagctctggatccagggactcgggactcctatggtgccaccagccacctccccaacaagggggccctggcgaaggtcaagaacaacttcaaagacttgatgtccaaactgacggagggccagtatgtgctgtgccggtggacagatggcctgtactacctcgggaagatcaagagggtcagcagctctaagcaaagctgcctcgtgactttcgaagataattccaaatactgggtcctatggaaggacatacagcatgccggtgttccaggagaggagcccaagtgcaacatctgcctagggaagacatcagggccgctgaatgagatcctcatctgcgggaagtgtggcctgggttaccaccagcagtgccacatccccatagcgggcagtgctgaccagcccctgctcacaccttggttctgccgacgctgcatcttcgcactggctgtgcggaaaggcggcgcgctgaagaagggcgccatcgccaggacgctgcaggccgtgaagatggtgctgtcctaccagcccgaggagctcgagtgggactcgccccatcgcaccaaccagcagcaatgctactgctactgcggcgggcccggagaatggtacctgcggatgctgcaatgttaccggtgcaggcagtggttccacgaggcctgcacccagtgcctcaatgagcccatgatgtttggagaccggttttacctgttcttctgctccgtgtgtaaccagggcccagagtacatcgagaggctgcccctgcgatgggtggatgtggttcacctggccctctataatctgggggtacagagcaagaagaagtactttgactttgaggagattctggcctttgtcaaccaccactgggagctcctgcagcttggcaagctcaccagcaccccagtgacagatcgaggaccacatctcctcaacgctctgaacagttataaaagccggttcctctgcggcaaggagatcaagaagaagaagtgcatcttccgcctgcgcatccgcgtcccacccaacccgccagggaagctgctgcctgacaaaggactgctgccaaatgagaacagcgcctcctctgagctgcgtaagagaggaaagagcaagcctggtttgttgcctcacgaattccagcagcagaaaaggcgagtttatagaagaaaaagatcaaagtttttgctggaagatgctattcccagtagtgacttcacctcagcctggagcaccaaccaccacctggctagcatatttgacttcacgctggatgaaattcaaagtttaaaaagtgccagctcaggccagaccttcttctcagatgtcgactccaccgacgctgccagcacctctggctctgcctccaccagcctctcctatgactccagatggacagtgggcagccgaaagaggaagctggcagccaaggcatacatgcccctgcgggcaaagcggtgggcagctgagctggatggacgctgcccctcggacagcagtgcagagggggcttcagtccccgagcggccagacgaaggcattgacagccacacatttgagagcatcagtgaagatgactcatccctgtcccacctcaagtcatctatcaccaactactttggtgcagctgggcggttggcctgtggggagaagtaccaggtgttggctcggagggtcacacctgagggcaaggttcagtacctggtggagtgggaagggaccaccccttactgactagcccccgggggtgccaggggtcctgaaaaccaaaggaggagcagcagaagccataggctccccagctttctccaggctggggtgggagaaggaagcaggacagagctgcaagtgcctggcagaatgccctgcctgcctgcctgccaggccaaggcctgcgtctctctgctgtaccagctctgttccagggcctcctcaggctcgttacccctgtgcctgtgtctctacacactccacaccccctcaaactctgtttatctgttctctgaccttgtgtcccctgcgctgggacccttcctcctgaggcccaggtctttgtccccagttgtgtgccttgacctctctcgcccctttctgggtgtgttcgcacatcctgtgtgtgcacagctgtccctccactggatccccttcacacgtgacccgtggggcagccagtcctcccagggactacataacaggcacctttgagagagcatgggagaaggtggataagaggatgctgctcagtgcttttctcttccactttcctgccactccccactaccctcggagagaggtggtgggatgggagagagcccctgtgaaagcctgtgaggatctgaagagtaaagggctgggtctgcctcagaaggcaccagcaccagggcccaggtattaaggctgagagtgaaggctgccaatgtcagctttggaggtcccagaagtcttctgttctctggcctcaccccctcagtcgccatagagctgggcctggccttgctggaatggaggcatccttccaaacctgggggacgggggtggggggtggtagtggtgggagggaaaccatgtcttgctaaacctgtttctggtgcctcccatccccagacccaccagacaccacacagcagacaatacacacccactcgcacaagcttccatccacatgtgttgtactttcagctctaggcatgcagacaaccccacacggccacaccaccacatgcccaagtgtacacacacagagccacaccgtccctctgggcctgctggctcctcccttggctttcccttggcccacttccagggcccaggtgctgcaactaaatgtgaaagctcagtggccgctccttctttcagcccatcaaccagcattggtcccatagggaagcacaggggactcaccctctttcatatcccttgccctgccctgaaatggacaatcactttttgggataggttgaaatttttaaagagcctgcatcatttggttccctcaaagggaagcccttgccagtgggggtttgaaagagaatttttggaaccaacattcaaattctgcctcatctggagggaaaccaaaattgggagggggaagaggacccctgatgttttgctgcttccagagatattagaaactgactcacttgattggaaaatggacaaaagtgccttgacgtggagggtgggcaccagatggggaccagccttgccaactgctgctgtggcctccagcttggctggttttgcaggccgccagcaggaaggcgaaggtggtagtacagcaagaggcactggcggggcagcaggcctgcaggagctgtttttccattgctaggcctgacccctctctacctgtgagcgttcagggggtccctgagatagtttagatgcccccccatcttagacctcagctcccacagtgccttttaagggggacctcacctcctgtgcacagcccacccactttcctctgcttccctggcacagcccaggcatagacgagctggcgttggacccagttcttcccccttttcagccccacagctgctgccacaggggccaactagggccaggtggaaggggagctgagaagccaacccctagcccaggggtgctgtgggaactgggatccaatttgtagcttcctgcctggcttcagagagcccagcaaccttctaggcctgctttccagacttctgagatagcctgggatgagcaatcctgttatagtacatctggaccttccctacctgggctctggggaggctgtgggcctggagagggaaaaggagggagggggtgtctgcaccacctgggaagatagcacaaggcctaatgaggtcaccctgactccccaccccagcatttcattcataccagataatagctgcattactgccaactgaccttataaccctctgcaccttcaaaaagattcatggtttttaattgctgcttttaataacatttgttaaagttataattaatgtgtctgatttatgatttaaaacctccctttgaacaatcaaaaaaaaaaaaaaaaaaaaaa

SEQ ID NO: 126 - DNA, 5935 bp, Homo sapiens
agtggtgtttggtgcgcgcgccggggaggtggtggtgggggggcgccgccgccgccaccgctgcggggccgggtctcgcgctgccgctgccgccgcctcgcgccgctgaggtgccgcgcgaggtggggggagggggagccgctcgccgggagcggtgtaaatgagcaaagatggatcaggaaggtgggggagatgggcagaaggccccgagcttccagtggcggaactacaagctcatcgtggatcctgccttggaccctgccctgcgcaggccttctcagaaggtgtaccgctatgatggagtccacttcagtgtcaacgactcaaagtatataccagtcgaagacctccaagacccccgttgccatgtcaggtccaaaaacagagacttttccctcccagtccctaagtttaagctggacgagttctatattggacagattccactgaaggaagtgacttttgcaaggctgaatgacaacgtgcgggagaccttcctgaaggatatgtgccgtaagtacggtgaggtggaagaggtagagatcctccttcacccccgtacgcgcaagcacctgggcctggcccgtgtgctcttcaccagcactcggggcgccaaggaaacggtcaaaaacctccaccttacctccgtcatgggcaacatcatccatgcccagcttgacatcaaaggacaacaacgaatgaaatactatgaactaattgtcaatggctcctacacccctcagactgtgcccactgggggcaaggccctgagtgagaagttccaaggctcgggtgcagccactgagacggccgaatcccgccgccgctcttcctctgacacagctgcctacccagcaggcaccactgcggtgggcactcctggcaacggcaccccctgctcccaggacacaagcttctccagcagccgacaagataccccatcttcctttggccagttcacacctcagtcctcccaaggaaccccctacacgtctcggggcagcaccccctactctcaggactctgcctactccagcagcaccacttcaacctccttcaagccccggcggtcagagaacagctaccaagatgccttttcccgccgccacttctctgcatcttcagcctccacaaccgcctccacggccatcgccgccaccactgcagccactgcctcatcctccgcctcttcctcctcattgtcctcgtcctcctcgtcatcctcttcctcctcgtcctctcagtttcgtagttctgatgcaaactacccagcgtattatgaaagctggaatcgctaccagcgccatacttcctacccaccacgccgggccacacgggaggaaccccctggagccccttttgctgaaaatacagctgagcgcttcccaccttcttacacctcctacctgccccccgagcccagccggcccaccgaccaggactaccggcctcctgcctcagaggctccacccccggagcctccagaacctggtggaggcgggggtggaggagggcccagccctgagagagaagaagttcggacttccccccgcccagcctcccctgcccgctctggctccccagccccggagaccaccaatgagagtgtgcccttcgcccagcacagcagcctggattcccgcatcgagatgctgctgaaggagcagcgctccaagttttccttcttggcctctgacacagaggaggaggaagagaacagcagcatggtccttggggccagagatacagggagtgaggtgccttctgggtcagggcatgggccctgcacaccccctccggccccagctaattttgaggatgtggcacctacagggagcggggagccaggggctacccgggagtctcccaaggcaaatggacagaaccaggcttctccatgctcttctggagacgacatggagatctccgacgacgaccggggtggctcaccccctccggccccgacgccccctcagcagcctccgccacctccccctcccccgccgcctcctcctccctacctggcgtcccttcctcttggttatcctccccaccaacctgcctacctcctcccacccagacctgatgggccgccgccccctgagtaccccccacctcctccaccacccccgcacatctatgactttgtgaactccttggagctcatggaccgacttggggctcagtggggagggatgcccatgtccttccagatgcagacccagatgttaactcggctccatcagctgcggcagggcaagggattgattgccgcctcagctggcccccccggtggggcctttggggaggccttcctcccgtttccacccccgcaggaggcagcctacggcttgccgtatgctctatatgcacaggggcaggagggcagaggggcatactcacgggaggcctaccacctgcccatgccaatggcagccgagcccctgccctcctcctcagtctcgggagaggaggcccggctgccacccagggaagaagcagagctggcagagggcaagaccctcccgacagcaggcaccgtgggccgtgtgctcgccatgctggtccaggagatgaagagcatcatgcagcgagacctcaaccgcaagatggtggagaacgtggccttcggagcctttgaccagtggtgggagagcaaggaggagaaggccaagccattccagaacgcggccaagcagcaagccaaggaggaggataaagagaagacgaagctgaaggagcctggcctgctgtccctcgtggactgggccaagagcgggggcactacgggcatcgaggctttcgcctttgggtcagggctgagaggggccctgcggctgccttcattcaaggtaaagcggaaagagccatcggaaatttccgaggccagtgaggaaaagaggcctcgtccctccactcctgctgaggaagatgaagacgaccctgaacaagagaaggaggctggagagccaggacgtccggggaccaagcccccgaagcgggacgaagagcgaggcaagacccagggcaagcaccgcaagtcctttgctctggacagcgaaggggaggaggcatcccaggagtcctcctcggagaaggatgaggaggatgacgaggaagatgaggaagatgaagatcgagaggaagctgtggataccacaaagaaggagacagaggtgtcggatggcgaggacgaggaaagcgattcgtcttccaaatgttctctgtatgctgactcagatggcgaaaatgacagcacatcagactccgagagcagcagctcttccagctcctcatcctcctcctcctcctcgtcctcatcctcctcgtcctcttcatcctctgagtcctcctctgaagatgaagaggaagaggagcggccagcagcccttccctcagcctccccgccccccagagaagtcccagtgcccacgccagcacctgtggaggtgccagtgccggaaagggttgcaggctccccagtcacacccctgcccgaacaggaggcgtctccagcaaggcctgcaggccccacggaggagtcaccccccagtgcgcctctgcgtcccccagaaccacctgctgggcccccggcccctgccccacgccccgatgagcgtccctcttctcccatccccctcctgcccccacccaagaaacgccggaaaactgtctccttctctgccatcgaggtggtgccagccccggagccccctccagccacaccgccgcaggccaagtttcccggcccagcctcccgcaaggctccccggggcgtggagcggaccatccgcaacctgcccctggaccacgcatctctggtcaagagttggcccgaggaggtgtcccgaggaggccggagccgggctggaggccgaggccgcctcaccgaggaagaggaggctgagccagggacagaggtggacctggcggtcctggccgacctggccctgacccctgcccggcgcgggctgcctgccctgcctgctgttgaagactcagaggccacagagacatcggacgaggccgagcgccctaggcccctgctcagccacatcctcctggagcacaactatgccctggccgtcaagcccacgccccctgcgccagccctgcggcccccggagccagtgcccgcacccgccgccctcttcagttccccagctgatgaggtcctggaggcccccgaggtggtggtggctgaggcggaggagcccaagccgcagcaactgcagcagcagcgggaggagggcgaagaggagggggaggaagagggggaggaagaggaggaggagtcctctgacagcagcagcagcagcgatggggagggcgccctccggaggcgcagcctccgctcccacgcccggcgccgccgccctccgcccccacccccgccgccaccgccccgcgcctacgagccacgcagtgagtttgaacagatgaccatcctgtatgacatttggaactcgggcctggactcagaggacatgagttacctgcggcttacgtacgagcggctgctgcagcagacaagcggggctgactggctcaacgacactcactgggtccatcacacaatcaccaacctgaccaccccaaaacgcaagcggcggccccaggatgggccccgggagcaccagacaggctcagcccgcagcgaaggctactaccccatcagcaagaaggagaaggacaagtacctggacgtgtgcccagtctcggcccggcagctggagggcgtggacactcaggggacgaaccgcgtgctgtccgagcgccggtccgagcagcggcggctgctgagcgccatcggtacctccgccatcatggacagtgacctgctgaaactcaaccagctcaagttccggaagaagaagctccgatttggccggagccggatccacgagtggggtctgtttgccatggaacccattgctgctgacgagatggtcatcgaatacgtgggtcagaacatccgtcagatggtggccgacatgcgggagaagcgctacgtgcaggagggcattggcagcagctacctgttccgggtggaccacgacaccatcatcgatgccaccaagtgtggcaacctggccagattcatcaaccactgctgcacgcctaactgctacgccaaggtcatcaccatcgagtcccagaagaagatcgtgatctactccaagcagcccattggcgtggacgaggagatcacctacgactacaagttcccactggaagacaacaagatcccgtgtctgtgtggcacagagagctgccggggctccctaaactgaggtggggcaggatgggtgcccacacccctatttattccccctggtgccctgagctcccagcacccccccagccttagtgggctcagcagggcccacatgcccccatctccaagcgtggggttgggggccccaagcccagcgagggagcctcagtccctggaggcagcttctgcctctcctgtcacccctgcccaccaccccctgattgtttttctttgcggagaagaagctgtaaatgttttgtagcagccagcagctgtttcctgtggaaacctggggtgccggcctgtacagattctgtcctggggggctacacagtcctcttgctttgtgttaatggggacttccccttacgccctgcgtgtacccctccccagtttaggggtctctggggcagtggccatgttctccccctgggggggctctgcacccccagtcctggggactccgtgcctggaaccctgcctcatctgttcctgccagaccctgagggtcacccttccaccctggtgtcactccccggctcagccaggccaggatggcggggtgggtcccttttgctgggctggactgtacatatgttaatagcgcaaacccgacgccacatttttataattgtgattaaactttattgtacaaaa

SEQ ID NO: 127 - DNA, 8195 bp, Homo sapiens
aacggcatggagaacagtcaccccccccaccaccaccaccagcagcccccgccgcagcccggcccttcgggcgagaggaggaaccaccattggagaagttacaagttgatgattgacccggctctgaaaaaggggcatcataaactgtaccgctacgatgggcagcatttcagcctggcgatgtccagcaaccgcccggtggaaattgtcgaagatccccgggtcgtcgggatctggaccaaaaacaaggagctggagctgtcggtgcccaaattcaagatcgatgagttctacgtgggcccggtgcctccgaagcaggtgacatttgccaagctgaatgataacatccgtgaaaacttcctgagggacatgtgcaagaagtatggggaggtggaggaggtggagattttgtacaaccccaagaccaagaagcacctgggcatcgccaaggtggtctttgccacggtccggggagccaaggatgccgttcagcacttgcacagcacttccgtcatgggcaacattatccacgtggagctggacaccaaaggggaaacccgaatgcggttctatgaactgttggtcactggccgatacaccccccagaccctcccagtgggcgagctggacgctgtctctccaatcgtgaatgagaccctgcagctgtcagatgccctgaagcgcctcaaggatggaggcctgtctgcaggctgtggctccggctcctcctctgtcacccccaatagcggtgggacacccttctcccaggacacagcttattccagctgccgcctggacacacccaactcctatggacagggcaccccgctcacaccgcgcctgggcacccctttctcacaggactccagctactccagccgccagcccacaccctcatacctcttcagccaggaccctgcagtgaccttcaaggcccggcgccacgagagcaagttcacggacgcctacaaccgccgccacgaacatcattatgtacacaattctcccgcggtcactgcggtggccggggccacagccgctttccggggttcctcggacctcccgttcggagcagtcggcggcactgggggcagcagcggtcccccgttcaaggctcaaccacaggattcagccacatttgcccacactccaccacccgcccaagcaacccctgctcctggattcaagtctgctttctctccgtatcagaccccagtggcccacttccctccacccccggaagagcccaccgccacagccgcttttggggcccgcgacagtggggagttccggagggcaccggcgcccccacccctgccacctgctgagcctctggccaaggagaagccaggcacgccacccggcccgccgccccccgacaccaacagcatggagctgggcggccggcccaccttcggctggagtcctgagccctgtgacagccctggcacgcccacgctggagtcgtcccctgcagggccagagaaaccccacgacagcctggactcgcgcatcgagatgctgctgaaggagcagcgcaccaagctgctcttcctgagggagccggactcggacaccgagctgcagatggagggcagccccatctcctcctcctcctcccagctctccccactggccccctttggcaccaactcccagccaggcttccggggccccacgcccccctcgtcacgcccctccagcaccggcctggaggatatcagcccaacacccctcccagactccgacgaggacgaggagctcgacctgggccttgggcctcggcctccacctgagccaggccccccggaccctgctgggcttctgagccagacagctgaggtggccttggacctggttggagacagaaccccgacctcagagaagatggatgagggccagcagtcctcaggcgaggacatggagatctcggatgacgagatgccctcggcccccatcaccagcgctgactgccccaagcccatggtggtgaccccaggagcggcagccgtggcagccccttctgtgctagccccaaccctgccgctgcccccgccacctggcttccccccgctgccccccccaccaccaccacccccaccgcagcctggcttccccatgcccccaccgctgcccccaccgccgcccccaccccctccagcccaccctgctgtgacagtgcccccaccacccttgccagcgccgcctggagtcccgcccccacccatcctgccaccactgcccccctttccgccgggcctgttccctgtgatgcaggtggacatgagccacgtgctgggtggccagtggggcggcatgcccatgtccttccagatgcaaacgcaggtgctcagccggctgatgacgggccagggcgcctgcccctacccgcccttcatggccgctgcggccgccgctgcctcagctgggctccagtttgtcaacctgccgccctaccggggccccttctccctgagcaactccggcccaggccgcgggcagcactggccaccactgcccaagtttgacccgtcagtgcctccaccaggctacatgccacgccaggaggacccacacaaagccacggtggatggcgtcctgctggtggtcctcaaagaactcaaggccatcatgaagcgtgacctgaaccgcaagatggtggaagtggtggctttccgggcctttgacgagtggtgggacaagaaggagcggatggccaaggcctcgctgaccccggtgaagtcgggcgagcacaaggacgaggacaggccgaagcccaaggaccgcatcgcctcgtgcctgctggagtcatggggcaagggcgagggcctgggctacgagggcctgggcctgggcattgggctgcgtggggccattcgcctgccctccttcaaggtcaagaggaaggagccaccagacaccacctcatctggcgaccagaagcggctgcggccctcgacctctgtggatgaggaagatgaagagtccgagcgagagcgagaccgggatatggcagacaccccctgtgagctcgccaagcgggaccccaagggcgtgggtgtgcggcggcggccggcgcggcctctggagctggacagtggtggggaggaggacgagaaggagtcattgtcggaggaacaggagagcaccgaggaggaagaggaggcggaggaggaggaggaggaggaagatgacgacgatgacgacagtgatgaccgggacgagtctgagaacgatgacgaggacacagccctgtcagaggcgagtgagaaggacgaaggggactcggatgaagaggagacagtgagcattgtaacctccaaggccgaagccacgtcgtccagtgagagttccgagtcttctgagtttgagtcaagctccgagtcctcgccctcatcctcggaggatgaggaggaggtagtggccagggaagaggaggaagaagaggaggaggaggagatggtggccgaggaaagcatggcttctgcaggccctgaggactttgagcaggacggggaggaagcggctctggccccgggggcacctgcagtggactcgttgggcatggaagaggaggtggacatcgagactgaggctgtggcccctgaggagcggccctccatgctggacgagccccccttgcctgtgggtgttgaagagccagcggactccagggagccgcctgaggaaccaggcctgagccaggaaggggccatgttgctgtctccagagccccctgccaaggaggtggaggctcgacccccattgtcccctgagcgagctccagaacatgacctggaagtggagccggagccccctatgatgctccccttgccgctgcaaccaccattgccgcccccacgaccaccccggccacccagcccaccgccggagcctgagaccacagatgcctcacacccatctgtccctccggagccccttgccgaggaccaccccccgcatactccaggcctctgtggcagcctggccaagtcgcagagcacagagacggtgccagccacaccaggcggggagcccccgctatcagggggcagcagtggcctgtccctgagctctccgcaagtgcccggcagccccttctcctacccagccccgtcccctagcttgagcagtgggggcctccctcggacacctggccgggacttcagcttcacacccaccttctccgagcccagcgggcccttgctcctgcccgtctgcccactccccactggccgacgcgatgaacgctccgggcccctggcctccccggtgctcctggagacgggcctgcccctccctctgccccttcccctgcccttgcccttggcattgcccgccgtcttgcgggcccaggctcgtgcgcccaccccgctgccacccctgctgcccgcccccctggcctcttgccctcccccaatgaagaggaagccgggccggccccggcgatccccaccatctatgctctccttggatgggcccttggtccgaccaccagcaggggccgcccttggaagggaactcctgctcctgccgggccagccacagacccccgtcttccccagcacccatgacccccggacggtgaccctggacttccggaacgcggggatcccagcccctccaccaccccttcccccccagccacccccacccccacctcccccacctgtagagcccaccaagctgccctttaaggagctagacaaccagtggccctccgaggccattcctccgggcccccgtgggcgcgatgaggtcactgaggaatacatggagttggccaagagccgggggccgtggcgccggccacctaagaagcgccatgaggacctggtgccacctgcgggctcgcccgaactctcgccaccccagcccctcttccggccccgctcggagtttgaggagatgaccatcctgtatgacatctggaacggtggcatcgatgaggaggacatccgcttcctgtgtgtcacctacgagcgactgctacagcaggacaatggcatggactggcttaacgacacgctctgggtctaccatccctccaccagcctctcttcagctaagaagaagaaacgggacgatggcatccgcgagcacgtgacgggctgtgcccgcagtgagggcttctacaccatcgacaagaaggacaagctcagatacctcaacagcagccgtgccagcaccgatgagccccccgcagacacccagggcatgagcatcccagcacagccccacgcctccacccgggcaggctcggagcggcgttcggagcagcgccgcctgctgtcctccttcactggcagctgtgacagtgacctgctcaagttcaaccagctcaagttccggaagaaaaagctcaagttctgcaagagccacattcacgactggggcttgttcgccatggagcccatcgcggctgacgagatggtcatcgagtacgtgggccagaatatccgtcaggtgatcgcagacatgcgggagaagcgttatgaggacgagggcatcgggagcagctacatgttccgggtggaccatgacaccatcatcgacgccaccaagtgcggcaacttcgcgcgcttcatcaaccacagctgcaaccccaactgctatgccaaggtgatcacggtggagtcacagaagaagatagtcatctactcgaagcagcacattaacgtcaatgaggagattacctatgactataagttccccatcgaggacgtcaagatcccctgcctctgtggctccgagaactgccgggggaccctcaactaggccccggcaccagactcaaaggatgtcagccgtagccctgggactcccgagcgtggagcccctggccccggggcccggccccccgcgcccgcccccatttcaggtgctgtcctctacccagcggccattcagggcctggcgccccacactaccccctggagcccctggctccggcccctccgcgggaaagggcttctctgtcgttcagcccacgtctctctcattttaacaaacgcccctttcaggatttctgtttaactccagcatcagcttctctctctccgtctctcctcccctctctctcttctctgtctcttctctctcccaccatcaccctcggcctcttcctgtgaatgctgctacgttgttttgtcttctctatttttttcctcgttgtgagaaaagacatttaaccgttgaaatgtgaaggtggaatcagagaggggccccgcgggggtctgcagaggcctcagtgtggctgtgcgtggcccgtgtcctggaagccacccggacctggacgcagggccaggtgctgtgggaaggatggaggcccccacggccttgacctcagaacactacgccctgaaagcgcccctcactgcccgtgggcacagtgaggagaccccacacctttccccacccgagctgcagcctgttccttccccagaggcctggggcaccactgacccggtggaccctgatggagctaagctgtcccaggcaggggtctccgctctgggctttccctgccacctcacaccccagcaccccctaaaccttgggttcaatgtttactttctcattcggatgccagcaacgcgggagcctctcggaggccccagtgcaggtgaggggcgctgagaacgcgggcagccactctcttctgcccttgccttcgccctgggtgggacagggctcccaagggcaggcgggtcccccagtcccgccattacgggttgtcagaccgtctgcgtgtggcattttttggcttataagcttcacccactcacccccaacccacaccccacatccccctgccggcagcccctcaacctaagaaggccagagcatatttattttcggagggagcagattacttctcccagagaaaggaaaatcttggaaaagatttaaaaacacaaatctaagccttgacggtttttttttcccttttgacccccttcccatctcttcagaatttattcccatggcttttttttttcttgtgcgtgtataaaatcaaaaggaaggggaaaaaggtttttgaagttcagaaccaacttctgtatatagaggctgccgcaaaggactttctcttgggaacattgtttcttgtagaaacatgcgggaagacattttttgctcatttctttgtacttccaaaaaaaaaggaaaaaaaagacaaaagcaagtccccccgtaccccagaaagcagaggaggcgtgtaaataatttctggaaagtgactgttgtgacccggagtcctcatcaagatgagcgcgctccatgagggagctgctcccaccctgcggacgcaggcggccggagcctctggtatctcagcttgtgtcaagcttgttatcatgtaaattctgtacaaagaattgttatttttctcttttttgttgttggtggttttgttgtgtgttttttgttgttttttttttattcctttcccccaggccctctctatttgagactgtgcccgccggtttcaagatcaaggaaattggtggcaacaagacacagatggggtacctgggcacagcggcgaacttctcttccgtttgcggttttctgcctaattgtgcaactgaggaaataatttatttttcacatgaggaaatgcgtagcttgtagagacggctgattcaagttacatgtacagcctccaaagggctgtctccattctgtccccttcccataaaagaagtgggggtgttcgagaagaccagggaagggacccttgcctcacccctccccctggcctcaccttgctcccagccatcgtgcccagtgttaacctcggctggccttcactaaggggactagacctccctctccccaggagccccagccccagagtggtttgcaataatcaagatatgtgtcgagtcatttttctttcaactccctcatttttcattgaacaaatctctgcttttcaagagttgggggtttctgctattttttgctttctctccctccccctgcaaagatgagaaccaatgagttttagggatgtttgtgcgggtagactccatcatccatatgtaacttgttttgaagagaagtgtttccgttgtgtgtcttgatgtaaatatttgttcatatttttgtgaattcaatactatgtaccattgtattatagtaacttttataaagcaaaccataaatatactgacttttcttacaga

SEQ ID NO: 128 - DNA, 2976 bp, Homo sapiens
ggaaagagtggtggcaggtgaagtcggagacgacagaggaactggtttcctccgccccgcaaggcacacagcctgccgacgccccattaatacatgtggaaggggaaagagactgaatggaggaatgaatacaacttgatccaggtcgtgcttcggaagcggtcactttacctgtgaacctctctgcctgacaaacgggcaatgtacggaatcaaccaccaagatggcggcgcccgtgaagaatccgcaattaggtcgccgtcatatgtcgcctaggaacgtacggaattcgacccacgtacggaatcggattccaagatgacggcatctatgaggaagtcacgcagtaggtgcagccatgttgcctgtacgtcgaggccgtacaagcagccgccgtacggactctactgacaaggtggcggcgccctcgggaaagccacattagagcgcggccatgttcccggcgaacatatggattcggccaccatacggatacgataagcaagatggcggcgcctgaggggtcttgggggctctaggccggccacctactggtttgcagcggagacgacgcatggggcctgcgcaataggagtacgctgcctgggaggcgtgactagaagcggaagtagttgtgggcgcctttgcaaccgcctgggacgccgccgagtggtctgtgcaggttcgcgggtcgctggcgggggtcgtgagggagtgcgccgggagcggagatatggagggagatggttcagacccagagcctccagatgccggggaggacagcaagtccgagaatggggagaatgcgcccatctactgcatctgccgcaaaccggacatcaactgcttcatgatcgggtgtgacaactgcaatgagtggttccatggggactgcatccggatcactgagaagatggccaaggccatccgggagtggtactgtcgggagtgcagagagaaagaccccaagctagagattcgctatcggcacaagaagtcacgggagcgggatggcaatgagcgggacagcagtgagccccgggatgagggtggagggcgcaagaggcctgtccctgatccagacctgcagcgccgggcagggtcagggacaggggttggggccatgcttgctcggggctctgcttcgccccacaaatcctctccgcagcccttggtggccacacccagccagcatcaccagcagcagcagcagcagatcaaacggtcagcccgcatgtgtggtgagtgtgaggcatgtcggcgcactgaggactgtggtcactgtgatttctgtcgggacatgaagaagttcgggggccccaacaagatccggcagaagtgccggctgcgccagtgccagctgcgggcccgggaatcgtacaagtacttcccttcctcgctctcaccagtgacgccctcagagtccctgccaaggccccgccggccactgcccacccaacagcagccacagccatcacagaagttagggcgcatccgtgaagatgagggggcagtggcgtcatcaacagtcaaggagcctcctgaggctacagccacacctgagccactctcagatgaggacctacctctggatcctgacctgtatcaggacttctgtgcaggggcctttgatgaccatggcctgccctggatgagcgacacagaagagtccccattcctggaccccgcgctgcggaagagggcagtgaaagtgaagcatgtgaagcgtcgggagaagaagtctgagaagaaggtgatggagaggaaggaggagcgatacaagcggcatcggcagaagcagaagcacaaggataaatggaaacacccagagagggctgatgccaaggaccctgcgtcactgccccagtgcctggggcccggctgtgtgcgccccgcccagcccagctccaagtattgctcagatgactgtggcatgaagctggcagccaaccgcatctacgagatcctcccccagcgcatccagcagtggcagcagagcccttgcattgctgaagagcacggcaagaagctgctcgaacgcattcgccgagagcagcagagtgcccgcactcgccttcaggaaatggaacgccgattccatgagcttgaggccatcattctacgtgccaagcagcaggctgtgcgcgaggatgaggagagcaacgagggtgacagtgatgacacagacctgcagatcttctgtgtttcctgtgggcaccccatcaacccacgtgttgccttgcgccacatggagcgctgctacgccaagtatgagagccagacgtcctttgggtccatgtaccccacacgcattgaaggggccacacgactcttctgtgatgtgtataatcctcagagcaaaacatactgtaagcggctccaggtgctgtgccccgagcactcacgggaccccaaagtgccagctgacgaggtatgcgggtgcccccttgtacgtgatgtctttgagctcacgggtgacttctgccgcctgcccaagcgccagtgcaatcgccattactgctgggagaagctgcggcgtgcggaagtggacttggagcgcgtgcgtgtgtggtacaagctggacgagctgtttgagcaggagcgcaatgtgcgcacagccatgacaaaccgcgcgggattgctggccctgatgctgcaccagacgatccagcacgatcccctcactaccgacctgcgctccagtgccgaccgctgagcctcctggcccggaccccttacaccctgcattccagatgggggagccgcccggtgcccgtgtgtccgttcctccactcatctgtttctccggttctccctgtgcccatccaccggttgaccgcccatctgcctttatcagagggactgtccccgtcgacatgttcagtgcctggtggggctgcggagtccactcatccttgcctcctctccctgggttttgttaataaaattttgaagaaaccaaggaaaaaaaaaaaa

SEQ ID NO: 129 - DNA, 2954 bp, Homo sapiens
cacagcaacgcgcgcgagagaagagagtattctcgcgagaagtccaggggtggccgtgatggcggcggcaggagcaggacctggccaggaagcgggtgccgggcctggcccaggagcggtcgcaaatgcaacaggggcagaagagggggagatgaagccggtggcagcgggagcagccgctcctcctggagaggggatctctgctgctccgacagttgagcccagttccggggaggctgaaggcggggaggcaaacttggtcgatgtaagcggtggcttggagacagaatcatctaatggaaaagatacactagaaggtgctggggatacatcagaggtgatggatactcaggcgggctccgtggatgaagagaatggccgacagttgggtgaggtagagctgcaatgtgggatttgtacaaaatggttcacggctgacacatttggcatagatacctcatcctgtctacctttcatgaccaactacagttttcattgcaacgtctgccatcacagtgggaatacctatttcctccggaagcaagcaaacttgaaggaaatgtgccttagtgctttggccaacctgacatggcagtcccgaacacaggatgaacatccgaagacaatgttctccaaagataaggatattataccatttattgataaatactgggagtgcatgacaaccagacagagacctgggaaaatgacttggccaaataacattgttaaaacaatgagtaaagaaagagatgtattcttggtaaaggaacacccagatccaggcagtaaagatccagaagaagattaccccaaatttggacttttggatcaggaccttagtaacattggtcctgcttatgacaaccaaaaacagagcagtgctgtgtctactagtgggaatttaaatgggggaattgcagcaggaagcagcggaaaaggacgaggagccaagcgcaaacagcaggatggagggaccacagggaccaccaagaaggcccggagtgaccctttgttttctgctcagcgccttccccctcatggctacccattggaacacccgtttaacaaagatggctatcggtatattctagctgagcctgatccgcacgcccctgaccccgagaagctggaacttgactgctgggcaggaaaacctattcctggagacctctacagagcctgcttgtatgaacgggttttgttagccctacatgatcgagctccccagttaaagatctcagatgaccggctgactgtggttggagagaagggctactctatggtgagggcctctcatggagtacggaaaggtgcctggtattttgaaatcactgtggatgagatgccaccagataccgctgccagactgggttggtcccagcccctaggaaaccttcaagctcctttaggttatgataaatttagctattcttggcggagcaaaaagggaaccaagttccaccagtccattggcaaacactactcttctggctatggacagggagacgtcctgggattttatattaatcttcctgaagacacagagacagccaagtcattgccagacacatacaaagataaggctttgataaaattcaagagttatttgtattttgaggaaaaagactttgtggataaagcagagaagagcctgaagcagactccccatagtgagataatattttataaaaatggtgtcaatcaaggtgtggcttacaaagatatttttgagggggtttacttcccagccatctcactgtacaagagctgcacggtttccattaactttggaccatgcttcaagtatcctccgaaggatctcacttaccgccctatgagtgacatgggctggggcgccgtggtagagcacaccctggctgacgtcttgtatcacgtggagacagaagtggatgggaggcgcagtcccccatgggaaccctgaccaggtccctcttttctgtcaaggactttctgggaataatactgggggttttgtttttgtttttgaactgtctcaaatgttctcccaaagatgctaaaaacacagcctctccttttagcaagttaaaaggctgggtaggactgcgggagactgcctgcctttcaccattttctccccacttccagtgactgctcttattttgtgtaccataagccaacaaccgctgactccaggattgcataagccccctgtgaaatcggtgctgtactgcataccctgccagctgtgacttgttatcctactatattttctaaggagtgaataatattgtccgagtaactaacttatttaaaagacatttccttctgtgggcattgactgtatcccacctgttttccaaggaaatggtaacctgtttctgagaacacctgaaatcaatggctatacattccaaaccaatctaaacgctatttccttttggtgtgggtttggttttgttcattttgaaatacacttttgaacactgagatccgtaaaactactagatctctggaagtgtaattgtgaaagaaacttgcttgcagctttaacaaaatgagaaacttcccaaataaaacttgttttgaagtttatgtgacactttgcttcccttcagattgggtgcctcttggtgacagtgttcagaaatgtaagcagcacgaggaagggagctggcactgggaggaagagccgggtttctgagttgtgttttggctgctttcctattgctcccattcttgccaatcagccaccccctttcctgtgaaaatctgccaccttgaggagaggaacaagagtttaaaagggctaatgatctccctcccggtcttcccttggaacatggatgttgatatatgtgcgggtggtttcctgtcttgcttatcttcctttgccctgagctgatggctaaagggcagttttcggactattaaagactgaaatgtaagaatgagccttctaggctgggcgc

SEQ ID NO: 130 - DNA, 800 bp, Homo sapiens
tggcgcggtgcagggctcttaagaacgaacggcttgggcgcgggtaatcagctccctttcccccactttctcacttattctaggtacttgggactgtcgtagagtttccagaccccatgtaggcgcccagtcgtggactgtcccactctgctgctctactgctcgtggtgctcccgcgcccagactggtatccggggactgtgacttgcagggtccgccatggagccagagcagatgctggagggacaaacgcaggttgcagaaaatcctcactctgagtacggtctcacagacaacgttgagagaatagtagaaaatgagaagattaatgcagaaaagtcatcaaagcagaaggtagatctccagtctttgccaactcgtgcctacctggatcagacagttgtgcctatcttattacagggacttgctgtgcttgcaaaggaaagaccaccaaatcccattgaatttctagcatcttatcttttaaaaaacaaggcacagtttgaagatcgaaactgacttaatgggaagaacagaaaaatttagttgctactgtagatttacatgattaagaggcagctttaattgccatgatcattccctctttttggatgtataagaaccttccggacaacagaacctatttctggaattgcagaagataacatatttcccttattttgatttaatcaccataaaccatacctatttaatgagtgtattctgtgcaatttttttctcagattgtctttaactttgtttttaaaatgaccttcaaaataaactgtcaaaacaccatt

SEQ ID NO: 131 - DNA, 4423 bp, Homo sapiens
ggaagccgcggggccttctaaggccgaaagtcttcggagcttgcgccagtctcttcgcggcgtccaccacttagacgcaagttgctgaagccggccggggagaaggtgttgttgccggagctgagaccgggcggccacagtccgcagggatgaacctcgagttgctggagtcctttgggcagaactatccagaggaagctgatggaactttggattgtatcagcatggctttgacttgcacctttaacaggtggggcacactgcttgcagttggctgtaatgatggccgaattgtcatctgggatttcttgacaagaggcattgctaaaataattagtgcacacatccatccagtgtgttctttatgctggagccgagatggtcataaactcgtgagtgcttccactgataacatagtgtcacagtgggatgttctttcaggcgactgtgaccagaggtttcgattcccttcacccatcttaaaagtccaatatcatccacgagatcagaacaaggttctcgtgtgtcccatgaaatctgctcctgtcatgttgaccctttcagattccaaacatgttgttctgccggtggacgatgactccgatttgaacgttgtggcatcttttgataggcgaggggaatatatttatacgggaaacgcaaaaggcaagattttggtcctaaaaacagattctcaggatcttgttgcttccttcagagtgacaactggaacaagcaataccacagccattaagtcaattgagtttgcccggaaggggagttgctttttaattaacacggcagatcgaataatcagagtttatgatggcagagaaatcttaacatgtggaagagatggagagcctgaacctatgcagaaattgcaggatttggtgaataggaccccatggaagaaatgttgtttctctggggatggggaatacatcgtggcaggttctgcccggcagcatgccctgtacatctgggagaagagcattggcaacctggtgaagattctccatgggacgagaggagaactcctcttggatgtagcttggcatcctgttcgacccatcatagcatccatttccagtggagtggtatctatctgggcacagaatcaagtagaaaactggagtgcatttgcaccagacttcaaagaattggatgaaaatgtagaatacgaagaaagggaatcagagtttgatattgaagatgaagataagagtgagcctgagcagacaggggctgatgctgcagaagatgaggaagtggatgtcaccagcgtggaccctattgctgccttctgtagcagtgatgaagagctggaagattcaaaggctctattgtatttacccattgcccctgaggtagaagacccagaagaaaatccttacggccccccaccggatgcagtccaaacctccttgatggatgaaggggctagttcagagaagaagaggcagtcctcagcagatgggtcccagccacctaagaagaaacccaaaacaaccaatatagaacttcaaggagtaccaaatgatgaagtccatccactactgggtgtgaagggggatggcaaatccaagaagaagcaagcaggccggcctaaaggatcaaaaggtaaagagaaagattctccatttaaaccgaaactctacaaaggggacagaggtttacctctggaaggatcagcgaagggtaaagtgcaggcggaactcagccagcccttgacagcaggaggagcaatctcagaactgttatgaagaccttcgaagttcttcattctttctcactttgccatcatgtggcctctggacactgtggtcagtcatttgaaaattgactttaatttaaaacaaaggcctgtgcctcccacccaggaggtgggagggtgaattttatgtttaaatgaagaagtgaattatggaagaagagtatacgaccttcccttccctttcaagcataagtccaaatagactctcaggaatgaagatttgtgaagacatcagataggaattttgactcatttaaactttgatgcttagttatgttgctggagaaaagatacttatgttttgctcatctaacttcattgtacccagcgtcattttgacatgtcatttcctatctcccatttgccttcggtcctcaatgcatgtctttgagtgacttcttatctgaaattttgctactggtatcctaggaaagcttttgttggatactctcattttaaacttctcctctccccagatacctcctatatttccatattgtgtgcaaaggatgggcagaaaagaaagtgcttgaaagatttcaaattttcagaaagggaacaacgaaggccctctcttcctctcataccacgttttgctcaagaagctgggctgtaacaattcagggttttcccttgttttcctctcattgcatgtttccctccaatattggttcattgtcatcaatcatggtttttgaagatagctagttttatccatctccagcaaagaatcatcaatagtttatattgctttacctgtgctggcttccagagatggaaacaaacccaggtgtctctcaacaagctacttttttactggggtgggggaatctatgcaaggagtaaagtaaaaccatccagaatcaaagcagcaaccacatagttcaaatcaaagatcaaggtgaattttttgtatcactgcctgtggaaatctatcctcatcagtcattgcatttttccctgcctatacctgtgctcctttttcttactgtgttttcagtcacttcctttctgtgaaaggttgcttagctttttttttgacatttgttgttctttataaaaataacagattggatagatgtgtacatttggtgtttgaaattctctgaaaatcccattaggaaaccaggtgtgaaaagggctcagtagcttctctgagtggcgtttttagctgactggaagtgcttaatctggatcgtcttttttttttttttttttttttcaatattttaaaaggagaatttaaatactgtgcttactgtgaaatatatcagttggtgagccgggcgtggtgggtcacgcctgtaatcccagcactttgggaggccaaggcgggttgatcacccgaggtcaggagttcaagaccagcctggccaacgtggtgaaagcctgtatctattaaaagacaaaaattagctgggcgtggtagtacatgcctgtaatcccagctacactggaggctgagtcaggagaatcacttgaacgtgggaggcagaggttgcagtgagtggagatcgcaccactgccctccagcctaggtgacagaatgagactctatctcaaaaaaaaaaaaaaaatgatatcagttggtggatgctcctataggtagccaaacacattgattacctgttagattttaggatagaaatcaaagtagagcacgtcagcaagagcctctttgtctcactccatcatttaaaaccagtatattcagtagttgaagaaagagctctccctgagtcagttgcaaaacgtctatatttttagatgccactacttttttcttaaatattcattttgagactgtcatgagttagaccagtggttgagattagtagatggctcactagacatgtttttgttttgcagacattatatccattccagtcctctgcactgtacactgcagcagtgtgcaaactatgggacttagagggtttctgccatctttccacgtgtgaagtagcttggtttcctctgcctgtgcatttggatgtttgtgctatgtccacctcctaaactggctactgagaaaatcatcttcagccctgtcagattgtctctggcagtagctcctaataattatttatgtttttggaatttttttttcaacttttaaaaaaccttctatccatttcaatttgaattatttgatttgtacaatatatgtatattctcttcttcctttttgtcatccctgccctgccacccccaaaattttgtttttaaaaatattctgggctgggcatggtggctcacacctgtaatcccagcacttggggaggccgaggctggtggatcatctgaggtcaggtgtttgagaccagcctggtcaacatggtgaaaccccgtctctactaaaaatacaaaaattagctgggcgtggtggcgggcacctgtaatcctagctactcgggaggctgaggcaggagaattgcttgaatccaggaggcagaggttgcagtgagctgagattgcgccactgcactccagcctgggtgacagagcaagactccatctcaaaaaaaaaaaaaaaaaaaaatctgtagttttgtacaagatgagacttagccttgggtacttcttgctgaagctttaatgctttgtaaataaaatcggatgtttattaaagaaaaaaaaaaaaaa

SEQ ID NO: 132 - DNA, 3163 bp, Homo sapiens
gccgcctggcgcccgcccgagctgccgccttgtcgagctgagtccgcgctcccgcccaggcggcggccgacgcgacgccccgagcgcccggccccgccgccgcggcccggcagactgcctctgtcaccgggtccctccacccttgtctcctgtgcggccagcgtcagagccatggcgacggaggagaagaagcccgagaccgaggccgccagagcacagccaaccccttcgtcatccgccactcagagcaagcctacacctgtgaagccaaactatgctctaaagttcacccttgctggccacaccaaagcagtgtcctccgtgaaattcagcccgaatggagagtggctggcaagttcatctgctgataaacttattaaaatttggggcgcgtatgatgggaaatttgagaaaaccatatctggtcacaagctgggaatatccgatgtagcctggtcgtcagattctaaccttcttgtttctgcctcagatgacaaaaccttgaagatatgggacgtgagctcgggcaagtgtctgaaaaccctgaagggacacagtaattatgtcttttgctgcaacttcaatccccagtccaaccttattgtctcaggatcctttgacgaaagcgtgaggatatgggatgtgaaaacagggaagtgcctcaagactttgccagctcactcggatccagtctcggccgttcattttaatcgtgatggatccttgatagtttcaagtagctatgatggtctctgtcgcatctgggacaccgcctcaggccagtgcctgaagacgctcatcgatgacgacaacccccccgtgtcttttgtgaagttctccccgaacggcaaatacatcctggccgccacgctggacaacactctgaagctctgggactacagcaaggggaagtgcctgaagacgtacactggccacaagaatgagaaatactgcatatttgccaatttctctgttactggtgggaagtggattgtgtctggctcagaggataaccttgtttacatctggaaccttcagacgaaagagattgtacagaaactacaaggccacacagatgtcgtgatctcaacagcttgtcacccaacagaaaacatcatcgcctctgctgcgctagaaaatgacaaaacaattaaactgtggaagagtgactgctaagtccctttgctcctgcccgcgagagactgtcgggaagttgacccggattggcaagaaacagggtgtcttggaggtggtcccccagatctgcgcctgggggtcaggacagggcctgatttgagcctcctctctgaagatgatttggccgagcggaaggtgtggaccaccggaaagttcttaaaagttgctggtgacatttcttgccaattctaacactgtctagggaagagttcctagtctattgtgttcaaacagagtcaacaaaagtttttaattttttattacagaagggtgaagttcaatttaacatgcgttgtgttttttcagtaaacgttctgtatctttttgatattccatgacccagtgcacgctgtggcctgtcaccgccaccgtggccccgccagctggcctcccctttggcccacgccggccgcccccattctctgctgcgtagatgccctggcccagggccctgactcctccattcccgccagtagctgttcctagtgtattttcgtctttctggaaaacagcattgagtggttgttttctgtgtaaagagccgtttgtgtcttgggagtttgtggcccacatgccgatagcacggtcatcgcacatgactctcccgtttgtctcagtgtccctgcaacaagcagcaccgcagactgtaataaaaggtggggttttgtgaatggttgtggcaagtgcgtccttgtgaagctcgtctccatgtggctttcttggagaaaggctcccctggggcaagagggtggaaggtttctttggacaggaggtgctgaggctggctgcacctgctctctgaagacgccttcctctctaggttcattgttcagtgttgctgggggcggggaacgggggtggggaggttcttagttgcgaaggagccaagctcctgatggacttgcgttgggatgtgggggacacctgtggcatggtaaggctccctgagtcccttactccaggtcagatgccagtgggactcatgcgccctatgagggctgcagggccagtgctgcccctcggactcctcgaggggttgggtgctaagcgcgagcctcgccgtccctgctggagccctcgcctgcctgcccctctgcctgtgctcctggcagtgtggcttcccggtgctcacctgcacagcagttaacagcagaggccgagcgggagcctctggggagcgaggctgaaacctgaacctgcccatggagacagttgtggtgagggttgccacacacagtgagggcggagcagggtggctgagggcacaggtgcctgggtctgtcccacggggcagggctttggggctgtgatgctctgggaagccagcttgggtcctgggtctacagagggccctggccccggagcccagccagctctgcctctctcagggcctggagtcctgggggagctcagccagctctgcctttctcagggcctggagtcctggatgaatcctgcaggtttttggttgcaccggcccagggaggaagcggggggtttgtcaggtgggctctcctggaggtcctcgagtggcaggggtgaggaggggattatctgaggcatctggagatgtatatcctgtggtttcccctgcccctctgtttccgatgaggtgtacggatgagtgacctgcactaagaagtgagttgccacagtgaaaatgggttggtttttgtcttcgacgctcagggtctgggcgcctcgcatttgcagtctgttgtgacagacacggggagctccgcgtgccagcctgtggctgccctgctgtgggggtcctggggccggcgaggccccttcagtcttgttctggggggacggcccactccggggagggggtgtgctgtgctgagcgctgtatccctgaatatagtttattttttctacatttgaattctgttgtagatttatgtaaaaatacattctttttgaaaataaaaattttcatgtcttctaatttaaaaaaaaa

SEQ ID NO: 133 - DNA, 16608 bp, Homo sapiens
ctgcttcacttcacggggcgaacatggcgcacagctgtcggtggcgcttccccgcccgacccgggaccaccgggggcggcggcggcggggggcgccggggcctagggggcgccccgcggcaacgcgtcccggccctgctgcttccccccgggcccccggtcggcggtggcggccccggggcgcccccctcccccccggctgtggcggccgcggcggcggcggcgggaagcagcggggctggggttccagggggagcggccgccgcctcagcagcctcctcgtcgtccgcctcgtcttcgtcttcgtcatcgtcctcagcctcttcagggccggccctgctccgggtgggcccgggcttcgacgcggcgctgcaggtctcggccgccatcggcaccaacctgcgccggttccgggccgtgtttggggagagcggcgggggaggcggcagcggagaggatgagcaattcttaggttttggctcagatgaagaagtcagagtgcgaagtcccacaaggtctccttcagttaaaactagtcctcgaaaacctcgtgggagacctagaagtggctctgaccgaaattcagctatcctctcagatccatctgtgttttcccctctaaataaatcagagaccaaatctggagataagatcaagaagaaagattctaaaagtatagaaaagaagagaggaagacctcccaccttccctggagtaaaaatcaaaataacacatggaaaggacatttcagagttaccaaagggaaacaaagaagatagcctgaaaaaaattaaaaggacaccttctgctacgtttcagcaagccacaaagattaaaaaattaagagcaggtaaactctctcctctcaagtctaagtttaagacagggaagcttcaaataggaaggaagggggtacaaattgtacgacggagaggaaggcctccatcaacagaaaggataaagaccccttcgggtctcctcattaattctgaactggaaaagccccagaaagtccggaaagacaaggaaggaacacctccacttacaaaagaagataagacagttgtcagacaaagccctcgaaggattaagccagttaggattattccttcttcaaaaaggacagatgcaaccattgctaagcaactcttacagagggcaaaaaagggggctcaaaagaaaattgaaaaagaagcagctcagctgcagggaagaaaggtgaagacacaggtcaaaaatattcgacagttcatcatgcctgttgtcagtgctatctcctcgcggatcattaagacccctcggcggtttatagaggatgaggattatgaccctccaattaaaattgcccgattagagtctacaccgaatagtagattcagtgccccgtcctgtggatcttctgaaaaatcaagtgcagcttctcagcactcctctcaaatgtcttcagactcctctcgatctagtagccccagtgttgatacctccacagactctcaggcttctgaggagattcaggtacttcctgaggagcggagcgatacccctgaagttcatcctccactgcccatttcccagtccccagaaaatgagagtaatgataggagaagcagaaggtattcagtgtcggagagaagttttggatctagaacgacgaaaaaattatcaactctacaaagtgccccccagcagcagacctcctcgtctccacctccacctctgctgactccaccgccaccactgcagccagcctccagtatctctgaccacacaccttggcttatgcctccaacaatccccttagcatcaccatttttgcctgcttccactgctcctatgcaagggaagcgaaaatctattttgcgagaaccgacatttaggtggacttctttaaagcattctaggtcagagccacaatacttttcctcagcaaagtatgccaaagaaggtcttattcgcaaaccaatatttgataatttccgaccccctccactaactcccgaggacgttggctttgcatctggtttttctgcatctggtaccgctgcttcagcccgattgttttcgccactccattctggaacaaggtttgatatgcacaaaaggagccctcttctgagagctccaagatttactccaagtgaggctcactctagaatatttgagtctgtaaccttgcctagtaatcgaacttctgctggaacatcttcttcaggagtatccaatagaaaaaggaaaagaaaagtgtttagtcctattcgatctgaaccaagatctccttctcactccatgaggacaagaagtggaaggcttagtagttctgagctctcacctctcacccccccgtcttctgtctcttcctcgttaagcatttctgttagtcctcttgccactagtgccttaaacccaacttttacttttccttctcattccctgactcagtctggggaatctgcagagaaaaatcagagaccaaggaagcagactagtgctccggcagagccattttcatcaagtagtcctactcctctcttcccttggtttaccccaggctctcagactgaaagagggagaaataaagacaaggcccccgaggagctgtccaaagatcgagatgctgacaagagcgtggagaaggacaagagtagagagagagaccgggagagagaaaaggagaataagcgggagtcaaggaaagagaaaaggaaaaagggatcagaaattcagagtagttctgctttgtatcctgtgggtagggtttccaaagagaaggttgttggtgaagatgttgccacttcatcttctgccaaaaaagcaacagggcggaagaagtcttcatcacatgattctgggactgatattacttctgtgactcttggggatacaacagctgtcaaaaccaaaatacttataaagaaagggagaggaaatctggaaaaaaccaacttggacctcggcccaactgccccatccctggagaaggagaaaaccctctgcctttccactccttcatctagcactgttaaacattccacttcctccataggctccatgttggctcaggcagacaagcttccaatgactgacaagagggttgccagcctcctaaaaaaggccaaagctcagctctgcaagattgagaagagtaagagtcttaaacaaaccgaccagcccaaagcacagggtcaagaaagtgactcatcagagacctctgtgcgaggaccccggattaaacatgtctgcagaagagcagctgttgcccttggccgaaaacgagctgtgtttcctgatgacatgcccaccctgagtgccttaccatgggaagaacgagaaaagattttgtcttccatggggaatgatgacaagtcatcaattgctggctcagaagatgctgaacctcttgctccacccatcaaaccaattaaacctgtcactagaaacaaggcaccccaggaacctccagtaaagaaaggacgtcgatcgaggcggtgtgggcagtgtcccggctgccaggtgcctgaggactgtggtgtttgtactaattgcttagataagcccaagtttggtggtcgcaatataaagaagcagtgctgcaagatgagaaaatgtcagaatctacaatggatgccttccaaagcctacctgcagaagcaagctaaagctgtgaaaaagaaagagaaaaagtctaagaccagtgaaaagaaagacagcaaagagagcagtgttgtgaagaacgtggtggactctagtcagaaacctaccccatcagcaagagaggatcctgccccaaagaaaagcagtagtgagcctcctccacgaaagcccgtcgaggaaaagagtgaagaagggaatgtctcggcccctgggcctgaatccaaacaggccaccactccagcttccaggaagtcaagcaagcaggtctcccagccagcactggtcatcccgcctcagccacctactacaggaccgccaagaaaagaagttcccaaaaccactcctagtgagcccaagaaaaagcagcctccaccaccagaatcaggtccagagcagagcaaacagaaaaaagtggctccccgcccaagtatccctgtaaaacaaaaaccaaaagaaaaggaaaaaccacctccggtcaataagcaggagaatgcaggcactttgaacatcctcagcactctctccaatggcaatagttctaagcaaaaaattccagcagatggagtccacaggatcagagtggactttaaggaggattgtgaagcagaaaatgtgtgggagatgggaggcttaggaatcttgacttctgttcctataacacccagggtggtttgctttctctgtgccagtagtgggcatgtagagtttgtgtattgccaagtctgttgtgagcccttccacaagttttgtttagaggagaacgagcgccctctggaggaccagctggaaaattggtgttgtcgtcgttgcaaattctgtcacgtttgtggaaggcaacatcaggctacaaagcagctgctggagtgtaataagtgccgaaacagctatcaccctgagtgcctgggaccaaactaccccaccaaacccacaaagaagaagaaagtctggatctgtaccaagtgtgttcgctgtaagagctgtggatccacaactccaggcaaagggtgggatgcacagtggtctcatgatttctcactgtgtcatgattgcgccaagctctttgctaaaggaaacttctgccctctctgtgacaaatgttatgatgatgatgactatgagagtaagatgatgcaatgtggaaagtgtgatcgctgggtccattccaaatgtgagaatctttcaggtacagaagatgagatgtatgagattctatctaatctgccagaaagtgtggcctacacttgtgtgaactgtactgagcggcaccctgcagagtggcgactggcccttgaaaaagagctgcagatttctctgaagcaagttctgacagctttgttgaattctcggactaccagccatttgctacgctaccggcaggctgccaagcctccagacttaaatcccgagacagaggagagtataccttcccgcagctcccccgaaggacctgatccaccagttcttactgaggtcagcaaacaggatgatcagcagcctttagatctagaaggagtcaagaggaagatggaccaagggaattacacatctgtgttggagttcagtgatgatattgtgaagatcattcaagcagccattaattcagatggaggacagccagaaattaaaaaagccaacagcatggtcaagtccttcttcattcggcaaatggaacgtgtttttccatggttcagtgtcaaaaagtccaggttttgggagccaaataaagtatcaagcaacagtgggatgttaccaaacgcagtgcttccaccttcacttgaccataattatgctcagtggcaggagcgagaggaaaacagccacactgagcagcctcctttaatgaagaaaatcattccagctcccaaacccaaaggtcctggagaaccagactcaccaactcctctgcatcctcctacaccaccaattttgagtactgataggagtcgagaagacagtccagagctgaacccacccccaggcatagaagacaatagacagtgtgcgttatgtttgacttatggtgatgacagtgctaatgatgctggtcgtttactatatattggccaaaatgagtggacacatgtaaattgtgctttgtggtcagcggaagtgtttgaagatgatgacggatcactaaagaatgtgcatatggctgtgatcaggggcaagcagctgagatgtgaattctgccaaaagccaggagccaccgtgggttgctgtctcacatcctgcaccagcaactatcacttcatgtgttcccgagccaagaactgtgtctttctggatgataaaaaagtatattgccaacgacatcgggatttgatcaaaggcgaagtggttcctgagaatggatttgaagttttcagaagagtgtttgtggactttgaaggaatcagcttgagaaggaagtttctcaatggcttggaaccagaaaatatccacatgatgattgggtctatgacaatcgactgcttaggaattctaaatgatctctccgactgtgaagataagctctttcctattggatatcagtgttccagggtatactggagcaccacagatgctcgcaagcgctgtgtatatacatgcaagatagtggagtgccgtcctccagtcgtagagccggatatcaacagcactgttgaacatgatgaaaacaggaccattgcccatagtccaacatcttttacagaaagttcatcaaaagagagtcaaaacacagctgaaattataagtcctccatcaccagaccgacctcctcattcacaaacctctggctcctgttattatcatgtcatctcaaaggtccccaggattcgaacacccagttattctccaacacagagatcccctggctgtcgaccgttgccttctgcaggaagtcctaccccaaccactcatgaaatagtcacagtaggtgatcctttactctcctctggacttcgaagcattggctccaggcgtcacagtacctcttccttatcaccccagcggtccaaactccggataatgtctccaatgagaactgggaatacttactctaggaataatgtttcctcagtctccaccaccgggaccgctactgatcttgaatcaagtgccaaagtagttgatcatgtcttagggccactgaattcaagtactagtttagggcaaaacacttccacctcttcaaatttgcaaaggacagtggttactgtaggcaataaaaacagtcacttggatggatcttcatcttcagaaatgaagcagtccagtgcttcagacttggtgtccaagagctcctctttaaagggagagaagaccaaagtgctgagttccaagagctcagagggatctgcacataatgtggcttaccctggaattcctaaactggccccacaggttcataacacaacatctagagaactgaatgttagtaaaatcggctcctttgctgaaccctcttcagtgtcgttttcttctaaagaggccctctccttcccacacctccatttgagagggcaaaggaatgatcgagaccaacacacagattctacccaatcagcaaactcctctccagatgaagatactgaagtcaaaaccttgaagctatctggaatgagcaacagatcatccattatcaacgaacatatgggatctagttccagagataggagacagaaagggaaaaaatcctgtaaagaaactttcaaagaaaagcattccagtaaatcttttttggaacctggtcaggtgacaactggtgaggaaggaaacttgaagccagagtttatggatgaggttttgactcctgagtatatgggccaacgaccatgtaacaatgtttcttctgataagattggtgataaaggcctttctatgccaggagtccccaaagctccacccatgcaagtagaaggatctgccaaggaattacaggcaccacggaaacgcacagtcaaagtgacactgacacctctaaaaatggaaaatgagagtcaatccaaaaatgccctgaaagaaagtagtcctgcttcccctttgcaaatagagtcaacatctcccacagaaccaatttcagcctctgaaaatccaggagatggtccagtggcccaaccaagccccaataatacctcatgccaggattctcaaagtaacaactatcagaatcttccagtacaggacagaaacctaatgcttccagatggccccaaacctcaggaggatggctcttttaaaaggaggtatccccgtcgcagtgcccgtgcacgttctaacatgttttttgggcttaccccactctatggagtaagatcctatggtgaagaagacattccattctacagcagctcaactgggaagaagcgaggcaagagatcagctgaaggacaggtggatggggccgatgacttaagcacttcagatgaagacgacttatactattacaacttcactagaacagtgatttcttcaggtggagaggaacgactggcatcccataatttatttcgggaggaggaacagtgtgatcttccaaaaatctcacagttggatggtgttgatgatgggacagagagtgatactagtgtcacagccacaacaaggaaaagcagccagattccaaaaagaaatggtaaagaaaatggaacagagaacttaaagattgatagacctgaagatgctggggagaaagaacatgtcactaagagttctgttggccacaaaaatgagccaaagatggataactgccattctgtaagcagagttaaaacacagggacaagattccttggaagctcagctcagctcattggagtcaagccgcagagtccacacaagtaccccctccgacaaaaatttactggacacctataatactgagctcctgaaatcagattcagacaataacaacagtgatgactgtgggaatatcctgccttcagacattatggactttgtactaaagaatactccatccatgcaggctttgggtgagagcccagagtcatcttcatcagaactcctgaatcttggtgaaggattgggtcttgacagtaatcgtgaaaaagacatgggtctttttgaagtattttctcagcagctgcctacaacagaacctgtggatagtagtgtctcttcctctatctcagcagaggaacagtttgagttgcctctagagctaccatctgatctgtctgtcttgaccacccggagtcccactgtccccagccagaatcccagtagactagctgttatctcagactcaggggagaagagagtaaccatcacagaaaaatctgtagcctcctctgaaagtgacccagcactgctgagcccaggagtagatccaactcctgaaggccacatgactcctgatcattttatccaaggacacatggatgcagaccacatctctagccctccttgtggttcagtagagcaaggtcatggcaacaatcaggatttaactaggaacagtagcacccctggccttcaggtacctgtttccccaactgttcccatccagaaccagaagtatgtgcccaattctactgatagtcctggcccgtctcagatttccaatgcagctgtccagaccactccaccccacctgaagccagccactgagaaactcatagttgttaaccagaacatgcagccactttatgttctccaaactcttccaaatggagtgacccaaaaaatccaattgacctcttctgttagttctacacccagtgtgatggagacaaatacttcagtattgggacccatgggaggtggtctcacccttaccacaggactaaatccaagcttgccaacttctcaatctttgttcccttctgctagcaaaggattgctacccatgtctcatcaccagcacttacattccttccctgcagctactcaaagtagtttcccaccaaacatcagcaatcctccttcaggcctgcttattggggttcagcctcctccggatccccaacttttggtttcagaatccagccagaggacagacctcagtaccacagtagccactccatcctctggactcaagaaaagacccatatctcgtctacagacccgaaagaataaaaaacttgctccctctagtaccccttcaaacattgccccttctgatgtggtttctaatatgacattgattaacttcacaccctcccagcttcctaatcatccaagtctgttagatttggggtcacttaatacttcatctcaccgaactgtccccaacatcataaaaagatctaaatctagcatcatgtattttgaaccggcacccctgttaccacagagtgtgggaggaactgctgccacagcggcaggcacatcaacaataagccaggatactagccacctcacatcagggtctgtgtctggcttggcatccagttcctctgtcttgaatgttgtatccatgcaaactaccacaacccctacaagtagtgcgtcagttccaggacacgtcaccttaaccaacccaaggttgcttggtaccccagatattggctcaataagcaatcttttaatcaaagctagccagcagagcctggggattcaggaccagcctgtggctttaccgccaagttcaggaatgtttccacaactggggacatcacagaccccctctactgctgcaataacagcggcatctagcatctgtgtgctcccctccactcagactacgggcataacagccgcttcaccttctggggaagcagacgaacactatcagcttcagcatgtgaaccagctccttgccagcaaaactgggattcattcttcccagcgtgatcttgattctgcttcagggccccaggtatccaactttacccagacggtagacgctcctaatagcatgggactggagcagaacaaggctttatcctcagctgtgcaagccagccccacctctcctgggggttctccatcctctccatcttctggacagcggtcagcaagcccttcagtgccgggtcccactaaacccaaaccaaaaaccaaacggtttcagctgcctctagacaaagggaatggcaagaagcacaaagtttcccatttgcggaccagttcttctgaagcacacattccagaccaagaaacgacatccctgacctcaggcacagggactccaggagcagaggctgagcagcaggatacagctagcgtggagcagtcctcccagaaggagtgtgggcaacctgcagggcaagtcgctgttcttccggaagttcaggtgacccaaaatccagcaaatgaacaagaaagtgcagaacctaaaacagtggaagaagaggaaagtaatttcagctccccactgatgctttggcttcagcaagaacaaaagcggaaggaaagcattactgagaaaaaacccaagaaaggacttgtttttgaaatttccagtgatgatggctttcagatctgtgcagaaagtattgaagatgcctggaagtcattgacagataaagtccaggaagctcgatcaaatgcccgcctaaagcagctctcatttgcaggtgttaacggtttgaggatgctggggattctccatgatgcagttgtgttcctcattgagcagctgtctggtgccaagcactgtcgaaattacaaattccgtttccacaagccagaggaggccaatgaaccccccttgaaccctcacggctcagccagggctgaagtccacctcaggaagtcagcatttgacatgtttaacttcctggcttctaaacatcgtcagcctcctgaatacaaccccaatgatgaagaagaggaggaggtacagctgaagtcagctcggagggcaactagcatggatctgccaatgcccatgcgcttccggcacttaaaaaagacttctaaggaggcagttggtgtctacaggtctcccatccatggccggggtcttttctgtaagagaaacattgatgcaggtgagatggtgattgagtatgccggcaacgtcatccgctccatccagactgacaagcgggaaaagtattacgacagcaagggcattggttgctatatgttccgaattgatgactcagaggtagtggatgccaccatgcatggaaatgctgcacgcttcatcaatcactcgtgtgagcctaactgctattctcgggtcatcaatattgatgggcagaagcacattgtcatctttgccatgcgtaagatctaccgaggagaggaactcacttacgactataagttccccattgaggatgccagcaacaagctgccctgcaactgtggcgccaagaaatgccggaagttcctaaactaaagctgctcttctcccccagtgttggagtgcaaggaggcggggccatccaaagcaacgctgaaggccttttccagcagctgggagctcccggattgcgtggcacagctgaggggcctctgtgatggctgagctctcttatgtcctatactcacatcagacatgtgatcatagtcccagagacagagttgaggtctcgaagaaaagatccatgatcggctttctcctggggcccctccaattgtttactgttagaaagtgggaatggggtccctagcagacttgcctggaaggagcctattatagagggttggttatgttgggagattgggcctgaatttctccacagaaataagttgccatcctcaggttggccctttcccaagcactgtaagtgagtgggtcaggcaaagccccaaatggagggttggttagattcctgacagtttgccagccaggccccacctacagcgtctgtcgaacaaacagaggtctggtggttttccctactatcctcccactcgagagttcacttctggttgggagacaggattcctagcacctccggtgtcaaaaggctgtcatggggttgtgccaattaattaccaaacattgagcctgcaggctttgagtgggagtgttgcccccaggagccttatctcagccaattacctttcttgacagtaggagcggcttccctctcccattccctcttcactcccttttcttcctttcccctgtcttcatgccactgctttcccatgcttctttcgggttgtaggggagactgactgcctgctcaaggacactccctgctgggcataggatgtgcctgcaaaaagttccctgagcctgtaagcactccaggtggggaagtggacaggagccattggtcataaccagacagaatttggaaacattttcataaagctccatggagagttttaaagaaacatatgtagcatgattttgtaggagaggaaaaagattatttaaataggatttaaatcatgcaacaacgagagtatcacagccaggatgacccttgggtcccattcctaagacatggttactttattttccccttgttaagacataggaagacttaatttttaaacggtcagtgtccagttgaaggcagaacactaatcagatttcaaggcccacaacttggggactagaccaccttatgttgagggaactctgccacctgcgtgcaacccacagctaaagtaaattcaatgacactactgccctgattactccttaggatgtggtcaaaacagcatcaaatgtttcttctcttcctttccccaagacagagtcctgaacctgttaaattaagtcattggattttactctgttctgtttacagtttactatttaaggttttataaatgtaaatatattttgtatatttttctatgagaagcacttcatagggagaagcacttatgacaaggctattttttaaaccgcggtattatcctaatttaaaagaagatcggtttttaataattttttattttcataggatgaagttagagaaaatattcagctgtacacacaaagtctggtttttcctgcccaacttccccctggaaggtgtactttttgttgtttaatgtgtagcttgtttgtgccctgttgacataaatgtttcctgggtttgctctttgacaataaatggagaaggaaggtcacccaactccattgggccactcccctccttcccctattgaagctcctcaaaaggctacagtaatatcttgatacaacagattctcttctttcccgcctctctcctttccggcgcaacttccagagtggtgggagacggcaatctttacatttccctcatctttcttacttcagagttagcaaacaacaagttgaatggcaacttgacatttttgcatcaccatctgcctcataggccactctttcctttccctctgcccaccaagtcctcatatctgcagagaacccattgatcaccttgtgccctcttttggggcagcctgttgaaactgaagcacagtctgaccactcacgataaagcagatttttctctgcctctgccacaaggtttcagagtagtgtagtccaagtagagggtggggcacccttttctcgccgcaagaagcccattcctatggaagtctagcaaagcaatacgactcagcccagcactctctgccccaggactcatggctctgctgtgccttccatcctgggctcccttctctcctgtgaccttaagaactttgtctggtggctttgctggaacattgtcactgttttcactgtcatgcagggagcccagcactgtggccaggatggcagagacttccttgtcatcatggagaagtgccagcaggggactgggaaaagcactctacccagacctcacctcccttcctccttttgcccatgaacaagatgcagtggccctaggggttccactagtgtctgctttcctttattattgcactgtgtgaggtttttttgtaaatccttgtattcctattttttttaaagaaaaaaaaaaaaccttaagctgcatttgttactgaaatgattaatgcactgatgggtcctgaattcaccttgagaaagacccaaaggccagtcagggggtggggggaactcagctaaatagacctagttactgccctgctaggccatgctgtactgtgagcccctcctcactctctaccaaccctaaaccctgaggacaggggaggaacccacagcttccttctcctgccagctgcagatggtttgccttgcctttccaccccctaattgtcaaccacaaaaatgagaaattcctcttctagctcagccttgagtccattgccaaattttcagcacacctgccagcaacttgggggaataagcgaaggtttccctacaagagggaaagaaggcaaaaacggcacagctatctccaaacacatctgagttcatttcaaaagtgaccaagggaatctccgcacaaaagtgcagattgaggaattgtgatgggtcattcccaagaatcccccaaggggcatcccaaatccctgaggagtaacagctgcaaacctggtcagttctcagtgagagccagctcacttatagctttgctgctagaacctgttgtggctgcatttcctggtggccagtgacaactgtgtaaccagaatagctgcatggcgctgaccctttggccggaacttggtctcttggctccctccttggccacccaccacctctcgcacagcccctctgtttttacaccaataacaagaattaagggggaagccctggcagctatacgttttcaaccagactcctttgccgggacccagcccgccaccctgctcgcctccgtcaaacccccggccaatgcagtgagcaccatgtagctcccttgatttaaaaaaaataaaaaataaaaaaaaaaggaaaaaaaaatacaacacacacacaaaaataaaaaaaatattctaatgaatgtatctttctaaaggactgacgttcaatcaaatatctgaaaatactaaaggtcaaaaccttgtcagatgttaacttctaagttcggtttgggattttttttttttaatagaaatcaagttgtttttgtttttaaggaaaagcgggtcattgcaaagggctgggtgtaattttatgtttcatttccttcattttaaagcaatacaaggttatggagcagatggttttgtgccgaatcatgaatactagtcaagtcacacactctggaaacttgcaactttttgtttgttttggttttcaaataaatataaatatgatatatataggaactaatatagtaatgcaccatgtaacaaagcctagttcagtccatggcttttaattctcttaacactatagataaggattgtgttacagttgctagtagcggcaggaagatgtcaggctcactttcctctgattcccgaaatggggggaacctctaaccataaaggaatggtagaacagtccattcctcggatcagagaaaaatgcagacatggtgtcacctggatttttttctgcccatgaatgttgccagtcagtacctgtcctccttgtttctctatttttggttatgaatgttggggttaccacctgcatttaggggaaaattgtgttctgtgctttcctggtatcttgttccgaggtactctagttctgtctttcaaccaagaaaatagaattgtggtgtttcttttattgaacttttaacagtctctttagtaaatacaggtagttgaataattgtttcaagagctcaacagatgacaagcttcttttctagaaataagacattttttgacaactttatcatgtataacagatctgttttttttccttgtgttcttccaagcttctggttagagaaaaagagaaaaaaaaaaaaggaaaatgtgtctaaagtccatcagtgttaactccctgtgacagggatgaaggaaaatactttaatagttcaaaaaataataatgctgaaagctctctacgaaagactgaatgtaaaagtaaaaagtgtacatagttgtaaaaaaaaggagtttttaaacatgtttattttctatgcacttttttttatttaagtgatagtttaattaataaacatgtcaagtttaaaaaaaaaaaaaaa

SEQ ID NO: 134 - DNA, 20709 bp, Homo sapiens
agcggaaggatcccgcagcgtgtgcgtagaactgcagagtcacagcctttcctccgagagggcgggatccctccgccgctccgctccaacacaaaatagggccgcctcttctcctttctccccctctcgagtggggtgccccgggcaaaaggcccccccggatctagcgccgaaggcttcacgaatcttcacgaccgctgcccagctcttgggccaggaaatagccccttcgcaggaaccaccctaccggccgaacaggaggcggagggggggaggcggagcggcgccgcgctgcactactttcctctccggttgcaaatggctgcctcgttccccactttccgctcagtttcctgaccccccggtgccgggagccggggttgggccatgcacctctaggccgcctgcgatcacagtcagccgggggtcgagggggtgccaccgaccagagccggccaggccgggggcggggcagctcccgaggccagaggggaagggaggcgagcgcagggcctggagcggccggaggggagcgggcagagggctcgcaccgcccgccccttccttttcctcgcctacctagcctcctcccttccccggggggagcagaaggtggggggctcgaagccgccgagggtgagcgctcggggtcgagaagcccggcgctgggtgtgtgtcaggttcagccccgcggccccgccggccccgcgtcgccgtagctcgcgcggccccgggcgccggccggggcggggagaggggctcggcgctcctgcgagggtctcacgttccatccgggccaggcgcggggcggcgcggcattccttccgggctgctggggaggcgcctcgacgttccatctggagagcctcgacgttccgcccgagcccggcgcgggcggccggggcgctggccgggccctaggactgagaggccgcccggcgacgcggatgcggagcctgctcgcccaagatcaaagccaccggtgctctctttgtgtccgctcgggattcgccgccctggggctgtccatggaaacctaaactgctggaacctgaggcagagaacccctctttggcttcttgctgtttttttgtggggggagggtggccactccgacctggatttaccgttcttggcccccctaagcccccccgtgcggggggcggctgtgatcgctctggcggttggaggtcggggagcggcccgggctctggccatgttctcggatgaggatttctggatcgccctgtgaagaggtctccccgagagggccctgcccagtcggagagagggatggacagccagaagctggctggtgaggataaagattcagaaccggcagctgatggacctgcagcttctgaggacccaagtgccactgagtcagacctgcccaacccacatgtgggagaggtctctgtccttagttctgggagtcccaggcttcaggagactcctcaggactgcagtgggggtccggtgcggcgttgtgctctctgtaactgcggggagcccagtctacacgggcagcgggagctacggcgctttgagttgccatttgattggccccggtgtccagtggtgtcccctggggggagcccagggcccaatgaggcagtgctgcccagtgaggacctatcacagattggtttccctgagggccttacacctgcccacctaggagaacctggagggtcctgctgggctcaccattggtgtgctgcatggtcggcaggcgtatgggggcaggagggcccagaactatgtggtgtggacaaggccatcttctcagggatctcacagcgctgctcccactgcaccaggctcggtgcctccatcccttgccgctcacctggatgtccacggctttaccacttcccctgcgcgactgccagcggttccttcctatccatgaaaacactgcagctgctatgcccagagcacagtgagggggctgcatatctggaggaggctcgctgtgcagtgtgtgaggggccaggggagttgtgtgacctgttcttctgtaccagctgtgggcatcactatcacggggcctgcctggacactgctctgactgcccgcaaacgtgctggctggcagtgccctgaatgcaaagtgtgccaagcctgcaggaaacctgggaatgactctaagatgttggtttgtgagacgtgtgacaaaggataccatactttctgcctaaaaccacccatggaggaactgcctgctcactcttggaagtgcaaggcgtgccgggtgtgccgggcctgtggggcgggctcagcagaactgaatcccaactcggagtggtttgagaactactctctctgtcaccgctgtcacaaagcccagggaggtcagactatccgctccgttgctgagcagcataccccggtgtgtagcagattttcacccccagagcctggcgatacccccactgacgagcccgatgctctgtacgttgcatgccaagggcagccaaagggtgggcacgtgacctctatgcaacccaaggaaccagggcccctgcaatgtgaagccaaaccactagggaaagcaggggtccaacttgagccccagttggaggcccccctaaacgaggagatgccactgctgcccccacctgaggagtcacccctgtccccaccacctgaggaatcacccacgtccccaccacctgaggcatcacgcctgtcaccaccacctgaggaattgcccgcatccccacttcctgaggcattgcacctgtcccggccgctggaggaatcgcccctctctccgccgcctgaggagtctcctctgtctcccccacctgaatcatcacctttttctccactggaggagtcgcccttgtctccaccggaagagtcacccccatctcctgcacttgagacgcctctatccccaccacctgaagcatcgcccctgtccccaccatttgaagaatctcctttgtccccgccacctgaggaattgcccacttccccgccacctgaagcatctcgcctgtctccaccacctgaggagtcacccatgtcccctccacctgaagagtcacccatgtctccaccaccggaggcatctcgtctgttcccaccatttgaagagtctcctctgtcccctccacctgaggagtctcccctttccccaccacctgaggcatcacgcctgtccccaccacctgaggactcgcctatgtccccaccacctgaagaatcacctatgtcccccccacctgaggtatcgcgcctatcccccctgcctgtggtgtcacgcctgtctccaccgcctgaggaatctcccttgtccccaccgcctgaggagtctcccacgtcccctccacctgaggcttcacgcctctccccaccacctgaggactcccccacatccccaccacctgaggactcacctgcttccccaccaccggaggactcgctcatgtccctgccgctggaggagtcacccctgttgccactacctgaggagccgcaactctgcccccggtccgaggggccgcacctgtcaccccggcctgaggagccgcacctgtccccccggcctgaggagccacacctatctccgcaggctgaggagccacacctgtccccccagcctgaggagccatgcctatgcgctgtgcctgaggagccacacttgtccccccaggctgagggaccacatctgtcccctcagcctgaggaattgcacctgtccccccagactgaggagccgcacctgtctcctgtgcctgaggagccatgcttgtccccccaacctgaggaatcacacctgtccccccagtctgaggagccatgcctgtccccccggcctgaggaatcgcatctgtcccctgagcttgagaagccacccctgtcccctcggcctgaaaagccccctgaggagccaggccaatgccctgcacctgaggagctgcccttgttccctccccctggggaaccatccttatctcccttgcttggagagccagccctgtctgagcctggggaaccacctctgtcccctctgcccgaggagctgccgttgtccccatctggggagccatccttgtcgcctcagctgatgccaccagatccccttcctcctccactctcacccatcatcacagctgcggccccaccggccctgtctcctttgggggagttagagtacccctttggtgccaaaggggacagtgaccctgagtcaccgttggctgcccccatcctggagacacccatcagccctccaccagaagctaactgcactgaccctgagcctgtcccccctatgatccttcccccatctccaggctccccagtggggccggcttctcccatcctgatggagccccttcctcctcagtgttcgccactccttcagcattccctggttccccaaaactcccctccttcccagtgctctcctcctgccctaccactgtccgttccctccccgttgagtcccatagggaaggtagtgggggtctcagatgaggctgagctgcacgagatggagactgagaaagtttcagaacctgaatgcccagccttggaacccagtgccaccagtcctctcccttccccaatgggggacctttcctgccccgcccccagccctgccccagccctggatgacttctctggcctaggggaagacacagcccctctggatgggattgatgctccgggttcacagccagagcctggacagacccctggcagtttggctagtgaacttaaaggctcccctgtgctcctggaccccgaggagctggcccctgtgacccctatggaggtctaccccgaatgcaagcagacagcagggcagggctcaccatgtgaagaacaggaagagccacgtgcaccggtggcccccacaccacccactctcatcaaatccgacatcgttaacgagatctctaatctgagccagggtgatgccagtgccagttttcctggctcagagcccctcctgggctctccagacccggaggggggtggctccctgtccatggagttgggggtctctacggatgttagtccagcccgagatgagggctccctacggctctgtactgactcactgccagagactgatgactcactattgtgcgatgctgggacagctatcagcggaggcaaagctgagggggagaaggggcggcggcgcagctccccagcccgttcccgcatcaaacagggtcgcagcagcagtttcccaggaagacgccggcctcgtggaggagcccatggaggacgtggtagaggacgggcccggctaaagtcaactgcttcttccattgagactctggttgctgacattgatagctctcccagtaaggaggaggaggaagaagatgatgacaccatgcagaataccgtggttctcttctccaacacagacaaatttgtcctaatgcaggacatgtgtgtggtatgtggcagctttggccggggggcagagggccacctccttgcctgttcgcagtgctctcagtgctatcacccttactgtgtcaacagcaagatcaccaaggtgatgctgctcaagggctggcgttgtgtggagtgtattgtgtgtgaggtgtgtggccaggcctccgacccctcacgcctgctgctctgtgatgactgtgatattagctaccacacatactgcctggaccccccactgctcaccgtccccaagggcggctggaagtgcaagtggtgtgtgtcctgtatgcagtgtggggctgcttcccctggcttccactgtgaatggcagaatagttacacacactgtgggccctgtgccagcctggtgacctgccctatctgtcatgctccttacgtagaagaggacctactaatccagtgccgccactgtgaacggtggatgcatgcaggctgtgagagcctcttcacagaggacgatgtggagcaggcagccgatgaaggctttgactgtgtctcctgccagccctacgtggtaaagcctgtggcgcctgttgcacctccagagctggtgcccatgaaggtgaaagagccagagccccagtactttcgcttcgaaggtgtgtggctgacagaaactggcatggccttgctgcgtaacctgaccatgtcaccactgcacaagcggcgccaacggcgaggacggcttggcctcccaggcgaggcaggattggagggttctgagccctcagatgcccttggccctgatgacaagaaggatggggacctggacaccgatgagctgctcaagggtgaaggtggtgtggagcacatggagtgcgaaattaaactggagggccccgtcagccctgatgtggagcctggcaaagaggagaccgaggaaagcaaaaaacgcaagcgtaaaccatatcggcctggcattggtggtttcatggtgcgacagcggaaatcccacacacgcacgaaaaaggggcctgctgcacaggcggaggtgttgagtggggatgggcagcccgacgaggtgatacctgctgacctgcctgcagagggcgccgtggagcagagcttagctgaaggggatgagaagaagaagcaacagcggcgagggcgcaagaagagcaaactggaggacatgttccctgcttacttgcaggaagccttctttgggaaggagctgctggacctgagccgtaaggccctttttgcagttggggtgggccggccaagctttggactagggaccccaaaagccaagggagatggaggctcagaaaggaaggaactccccacatcgcagaaaggagatgatggtccagatattgcagatgaagaatcccgtggcctcgagggcaaagccgatacaccaggacctgaggatgggggcgtgaaggcatccccagtgcccagtgaccctgagaagccaggcaccccaggtgaagggatgcttagctctgacttagacaggatttccacagaagaactgcccaagatggaatccaaggacctgcagcagctcttcaaggatgttctgggctctgaacgagaacagcatctgggttgtggaacccctggcctagaaggcagccgtacgccactgcagaggccctttcttcaaggtggactccctttgggcaatctgccctccagcagcccaatggactcctacccaggcctctgccagtccccgttcctggattctagggagcgcgggggcttctttagcccggaacccggtgagcccgacagcccctggacgggctcaggtggcaccacgccctccacccccacaacccccaccacggagggtgagggcgacggactctcctataaccagcggagtcttcagcgctgggagaaggatgaggagttgggccagctgtccaccatctcacctgtgctctatgccaacattaattttcctaatctcaagcaagactacccagactggtcaagccgttgcaaacaaatcatgaagctctggagaaaggttccagcagctgacaaagccccctacctgcaaaaggccaaagataaccgggcagctcaccgcatcaacaaggtgcagaagcaggctgagagccagatcaacaagcagaccaaggtgggcgacatagcccgtaagactgaccgaccggccctacatctccgcattcccccgcagccaggggcactgggcagcccgccccccgctgctgcccccaccattttcattggcagccccactacccccgccggcttgtctacctctgcggacgggttcctgaagccgccggcgggctcggtgcctggccctgactcgcctggtgagctcttcctcaagctcccaccccaggtgcccgcccaagtgccttcgcaggacccctttggactggcccctgcctatcccctggagccccgcttccccacggcaccgcccacctatcccccctatcctagtcctacgggggcccctgcgcagcccccgatgctgggcgcctcatctcgtcctggggctggccagccaggggaattccacactaccccacctggcacccccagacaccagccctccacacctgacccattcctcaaaccccgctgcccctcgctggataacttggctgtgcctgagagccctggggtagggggaggcaaagcttccgagcccctgctctcgcccccaccttttggggagtcccggaaggccctagaggtgaagaaggaagagcttggggcatcctctcctagctatgggcccccaaacctgggctttgttgactcaccctcctcaggcacccacctgggtggcctggagttaaagacacctgatgtcttcaaagcccccctgacccctcgggcatctcaggtagagccccagagcccgggcttgggcctaaggccccaggagccaccccctgcccaggctttggcaccttctcctccaagtcacccagacatctttcgccctggctcctacactgacccatatgctcagcccccattgactcctcggccccaacctccgccccctgagagctgctgtgctctgccccctcgctcactgccctccgaccctttctcccgagtgcctgccagtcctcagtcccagtccagctcccagtctccactgacaccccggcctctgtctgctgaagctttttgcccatcacccgttacccctcgcttccagtcccctgacccttattctcgcccaccctcacgccctcagtcccgtgacccatttgccccattgcataagccaccccgaccccagccccctgaagttgcctttaaggctgggtctctagcccacacttcgctgggggctggggggttcccagcagccctgcccgcggggccagcaggtgagctccatgccaaggtcccaagtgggcagccccccaattttgtccggtcccctgggacgggtgcatttgtgggcaccccctctcccatgcgtttcactttccctcaggcagtaggggagccttccctaaagccccctgtccctcagcctggtctcccgccaccccatgggatcaacagccattttgggcccggccccaccttgggcaagcctcaaagcacaaactacacagtagccacagggaacttccacccatcgggcagccccctggggcccagcagcgggtccacaggggagagctatgggctgtccccactacgccctccgtcggttctgccaccacctgcacccgacggatccctcccctacctgtcccatggagcctcacagcgatcaggcatcacctctcctgtcgaaaagcgagaagacccagggactggaatgggtagctctttggcgacagctgaactcccaggtacccaggacccaggcatgtccggccttagccaaacagagctggagaagcaacggcagcgccagcgactacgagagctgctgattcggcagcagatccagcgcaacaccctgcggcaggagaaggaaacagctgcagcagctgcaggagcagtggggcctccaggcagctggggtgctgagcccagcagccctgcctttgagcagctgagtcgaggccagaccccctttgctgggacacaggacaagagcagccttgtggggttgcccccaagcaagctgagtggccccatcctggggccagggtccttccctagcgatgaccgactctcccggccacctccaccagccacgccttcctctatggatgtgaacagccggcaactggtaggaggctcccaagctttctatcagcgagcaccctatcctgggtccctgcccttacagcagcaacagcaacaactgtggcagcaacaacaggcaacagcagcaacctccatgcgatttgccatgtcagctcgctttccatcaactcctggacctgaacttggccgccaagccctaggttccccgttggcgggaatttccacccgtctgccaggccctggtgagccagtgcctggtccagctggtcctgcccagttcattgagctgcggcacaatgtacagaaaggactgggacctgggggcactccgtttcctggtcagggcccacctcagagaccccgtttttaccctgtaagtgaggacccccaccgactggctcctgaagggcttcggggcctggcggtatcaggtcttcccccacagaaaccctcagccccaccggcccctgaattgaacaacagtcttcatccaacaccccacaccaagggtcctaccctgccaactggtttggagctggtcaaccggcccccgtcgagcactgagcttggccgccccaatcctctggccctggaagctgggaagttgccctgtgaggatcccgagctggatgacgattttgatgcccacaaggccctagaggatgatgaagagcttgctcacctgggtctgggtgtggatgtggccaagggtgatgatgaacttggcaccttagaaaacctggagaccaatgacccccacttggatgacctgctcaatggagacgagtttgacctgctggcatatactgatcctgagctggacactggggacaagaaggatatcttcaatgagcacctgaggctggtagaatcggctaatgagaaggctgaacgggaggccctgctgcggggggtggagccaggacccttgggccctgaggagcgccctccccctgctgctgatgcctctgaaccccgcctggcatctgtgctccctgaggtgaagcccaaggtggaggagggtggacgccacccttctccttgccaattcaccattgctacccccaaggtagagcccgcacctgctgccaattcccttggcctggggctaaagccaggacagagcatgatgggcagccgggatacccggatgggcacagggccattttctagcagtgggcacacagctgagaaggcctcctttggggccacgggaggaccaccagctcacctgctgacccccagcccactgagtggcccaggaggatcctccctgctggaaaagtttgagctcgagagtggggctttgaccttgcctggtggacctgcagcatctggggatgagctagacaagatggagagctcactggtagccagcgagttacccctgctcattgaggacctgttggagcatgagaagaaggagctgcagaagaagcagcagctttcagcacagttgcagcctgcccagcagcagcagcaacagcagcagcagcattccctactgtctgcaccaggccctgcccaggccatgtctttgccacatgagggctcttctcccagtttggctgggtcccaacagcagctttccctgggtcttgcaggtgcccgacagccaggtttgccccagccactgatgcccacccagccaccagctcatgccctccagcaacgcctggctccatccatggctatggtgtccaatcaagggcatatgctaagtgggcagcatggagggcaggcaggcttggtaccccagcagagctcacagccagtgctatcacagaagcccatgggcaccatgccaccttccatgtgcatgaagccgcagcaattggcaatgcagcagcagctggcaaacagcttcttcccagatacagacctggacaaatttgctgcagaagatatcattgatcccattgcaaaggccaagatggtggctttgaaaggcatcaagaaagtgatggctcagggcagcattggggtggcacctggtatgaacagacagcaagtgtctctgctagcccagaggctctcggggggacctagcagtgatctgcagaaccatgtggcagctgggagtggccaggagcggagtgctggtgatccctcccagcctcgtcccaacccgcccacttttgctcagggagtgatcaatgaagctgaccagcggcagtatgaggagtggctgttccatacccagcagctcctacagatgcagctgaaggtgctagaggagcagattggtgtacaccgcaagtcccggaaggctctgtgtgccaagcagcgcactgccaaaaaagctggccgtgagttcccagaagctgatgctgagaagctcaagctggttacagagcagcagagcaagatccagaaacaactggatcaggtccggaaacagcagaaggagcacactaatctcatggcagaatatcggaacaagcagcagcaacaacagcagcagcagcagcaacaacagcaacagcactcagctgtgctggctctcagcccttcccagagtccccggctgctcaccaagctccctggtcagctgctccctggccatgggctgcagccaccacaggggcctccgggtgggcaagccggaggtcttcgcctgacccctgggggtatggcactacctggacagcctggtggccccttccttaatacagctctggcccaacagcagcaacagcaacattctggtggggctggatccctggctggcccttcagggggcttcttccctggcaaccttgctcttcgaagcctcggacctgattcaaggcttttacaggaaaggcagctgcagctgcagcagcaacgtatgcagctggcccagaaactgcagcagcagcagcagcagcaacagcagcagcagcaccttctaggacaggtggcaatccagcagcaacagcagcagggtcctggagtacagacaaaccaagctctgggtcccaagccccagggccttatgcctcccagcagccaccaaggcctcctggtccagcagctgtcccctcaaccaccccaggggccccagggcatgctgggccctgcccaggtggctgtgttgcagcagcagcaccctggagctttgggcccccagggccctcacagacaggtgcttatgacccagtcccgggtgctcagttccccccagctggcacagcagggtcagggccttatgggacacaggctggtcacagcccagcagcagcagcagcaacaacagcaccaacagcaagggtccatggcagggctgtcccatcttcagcagagtctgatgtcacacagtgggcagcccaaactgagcgctcagcccatgggctctttacagcagcttcagcagcagcagcagctgcaacagcaacagcaacttcagcagcagcagcagcagcagctacaacagcaacagcaacttcagcagcaacagcttcaacagcagcaacagcagcagcagcttcaacaacagcagcagcaacagcttcaacagcagcaacagcagctacaacagcaacagcaacaacaacagcagcagtttcaacagcagcagcaacagcagcagatgggccttttaaaccagagtcgaactttactgtctcctcagcaacaacagcagcagcaagtggcacttggccctggcatgccagcaaagcctcttcaacacttttctagccctggagccctgggtccaaccctcctcctgacgggcaaggaacaaaacaccgtagacccagccgtttcttcagaggccactgaggggccctctacacatcagggagggccgttagcaataggaactacccctgagtcaatggccactgaaccaggagaggtaaagccctcactctctggggactcacaactcctgcttgtccaaccccagccccagcctcagcccagctctctgcagctgcagccacctctgaggcttccaggacaacagcagcagcaagttagcctgctccacacagcaggtggaggaagccatgggcagctaggcagtggatcatcttctgaggcctcatctgtgccccacctgctggctcagccctctgtttccttaggggatcagcctgggtccatgacccagaaccttctgggcccccaacagcccatgctagagcggcccatgcaaaataatacagggccacaacctcccaaaccaggacctgtcctccagtctgggcagggtctgcctggggttggaatcatgcctacggtgggtcagcttcgagcacagctccaaggagtcctggccaaaaacccacagctgcggcacttaagtcctcagcagcagcagcagctacaggcactcctcatgcagcggcagctgcagcagagtcaggcagtacgccagaccccaccctaccaggagcctgggacccagacctctcccctccagggcctcctgggctgccaacctcaacttgggggcttccctggaccacagacaggccccctccaggagctaggggcagggcctcgacctcagggcccaccccggctccctgccccaccaggagccttatctacaggaccagtccttggccctgtccatcccacacctccaccatccagccctcaagagccaaagagaccttcacaattaccttcccccagctcccagcttcccactgaggcccagctccctcccacccatccagggacccccaaacctcaggggccaaccttggagccgcctcctgggagggtctcacctgctgctgcccagcttgcagataccttgtttagcaagggtctgggaccttgggatcccccagacaacctagcagaaacccagaagccagagcagagcagcctggtacctgggcatctggaccaggtgaatggacaggtggtgcctgaggcatcccaactcagcatcaagcaggaacctcgggaagagccatgtgccctgggagcccagtcagtgaagagggaggccaatggggagccaataggggcaccaggaaccagcaaccacctcctgctggcaggccctcgctcagaagctgggcatctgctcttgcagaagctactccgggcaaagaatgtgcaactcagcactgggcgggggtccgaggggctgcgagctgagatcaacgggcacattgacagcaagctggctgggctggagcagaaactacagggtacccccagcaacaaggaggatgcagcagcaaggaagcctttgacaccgaagcccaagcgggtacagaaggcaagcgacaggttggtgagctcccgaaagaagctgcggaaggaggacggggtcagggccagcgaggccttgctgaaacagctgaaacaggagctgtccctgctgcccctaacggagcctgctatcaccgccaattttagcctctttgccccctttggcagtggctgcccagtcaatgggcagagccagctgaggggggcctttggaagtggggcgctgcccactggccctgactactattcccagctgcttaccaagaataacctgagtaacccgccgacaccaccctcgtcgctgccccccaccccacccccatcggtgcagcagaagatggtgaatggcgtcaccccatctgaagagctgggggagcaccccaaggatgctgcctctgcccgggatagtgaaagggcactgagggatacttcagaggtgaagagtctagacctgctggctgccttgcctacaccccctcacaatcagactgaggatgtcaggatggagagtgatgaggatagcgattctcctgacagcattgtgccagcttcatcccctgagagcatcttgggggaggaggcccctcgtttccctcatctgggctcaggccggtgggagcaagaggaccgggccctctcccctgtcatccccctcattcctcgggccagcatcccagtcttcccagataccaaaccttatggggcccttggcctggaggtccctggaaagctgcctgtcacaacttgggaaaagggcaaaggaagtgaggtgtcagtcatgctcacagtctctgctgctgcagccaagaacctgaatggcgtgatggtggcagtggcggagctgctgagcatgaagatccccaactcctatgaggtgctgttcccagagagccccgcccgggcaggcactgagccaaagaagggggaagctgagggtcctggtgggaaggaaaagggtctggaaggcaagagcccagacactggccctgattggctgaagcagtttgatgcagtgttgcctggctataccctgaagagccaactagacatcttgagcctcctgaaacaggagagccccgccccagagccacccactcagcacagctatacctacaatgtctccaatctggatgtgcgacagctctcggccccacctcctgaagaaccctccccgcccccttcccccttggcaccttctcctgccagtccccctactgagcccttggttgaacttcccaccgaacccttggctgagccacccgtcccctcacctctgccactggcctcatcccctgaatcagcccgacccaagccccgtgcccggccccctgaagaaggtgaagattcccgtcctcctcgcctcaagaaatggaaaggagtgcgctggaagcggcttcggctgctgctgaccatccagaagggcagtgggcggcaggaggatgagcgggaagtggcagagtttatggagcagcttggcacagccttgcgacctgacaaggtaccgcgagacatgcgtcgctgctgtttctgtcatgaggagggtgacggggccactgatgggcctgcccgtctgctgaacctggacctggacctgtgggtgcacctcaactgtgccctttggtccacggaggtgtatgagacccagggcggggcactgatgaatgtggaggttgccctgcaccgaggactgctaaccaagtgctccctgtgccagcgaactggtgccaccagcagctgcaatcgcatgcgttgccccaatgtctaccattttgcttgtgccatccgtgccaagtgcatgttcttcaaggacaagaccatgctgtgtccaatgcataagatcaaggggccctgtgagcaagagctgagctcttttgctgtcttccggcgggtctacattgagcgggacgaggtgaagcaaatcgctagcatcattcagcggggagaacggctgcacatgttccgtgtggggggccttgtgttccacgccatcggacagctgctgcctcaccagatggctgactttcatagtgccactgccctctatcccgtgggctacgaggccacgcgcatctattggagcctccgcaccaacaatcgtcgctgctgctatcgctgttctattggtgagaacaacgggcggccggagtttgtaatcaaagtcatcgagcagggcctggaggacctggtcttcactgacgcctctccccaggccgtgtggaatcgcatcattgagcctgtggctgccatgagaaaagaggctgacatgctgcgactcttccctgagtatctgaagggcgaggagctctttgggctgacggtgcatgccgtgcttcgcatagctgaatcactgcccggggtggagagctgtcaaaactatttattccgctatgggcgccacccccttatggagctgccactcatgatcaaccccactggctgtgcccgatcagagcctaaaatcctcacacactacaaacggccccataccctgaacagcaccagcatgtctaaggcatatcagagcaccttcacaggcgagaccaacaccccctacagcaagcagtttgtgcactccaagtcatctcagtaccggcggctgcgcaccgaatggaagaacaacgtgtacctggctcgctcccgtatccagggcctggggctctatgcagccaaggacctagaaaagcacacaatggttatcgagtacattggcaccatcattcggaacgaggtggccaaccggcgggagaaaatctacgaagagcagaatcgaggcatctacatgttccgaataaacaatgaacatgtgattgatgctacgttgaccggcggccctgccaggtacattaaccattcctgtgcccctaactgtgtggccgaagtcgtgacatttgacaaagaggacaaaatcatcatcatctccagccggcgaatccccaaaggagaggagctaacctatgactatcagtttgattttgaggacgatcagcacaagatcccctgccactgtggagcctggaattgtcggaaatggatgaactaagaagctttgaggctaccaggcaggggagtccccctacccacaacctcttccctgaaagggatgagggggaagagaggtagcagccagagccaggacccagggttggggctgccggctgacccggagcccctggagcaggaggctggggcagagggccctaggccaagcccaccctgggcaccagggacaatcctcttccccaccaccggccctcaggctggcatctctgcccccagctccaggaggggccagacagaagcagccattgggcatctcaggtttgagggggatatgggccgggaactacccagaagcatctgggaggcagcagggtgggggaagaggatgtgtggccgggcctcacagccctgctgctcccactgacctctccggcccaactcacggctgcaaagagacttgactaagcttgacaatcccaaaggccgggtcccacacctggccctgcctgccgggtcctgcccccaccctcacccccatccccctccctcttgatctgtctctgtttccctcttttcctctgtgtttctgtctctctatgggttgtgtttccttgttttccactctgacaaatgcaacatgaacgggaaagaggcgcccagctgcctaggagggcaagctgggcaagccgggcaaggagaccccgcacccacacctacctcatttaagtgttggattttttgctgttttgaaatgtgagaccctctccaagccccctactgccccaaccctctcccccacctcactgccctcttctgagtgggtggaaggggggtaggaggaggaagaaaaacaacaacaaaaaatccatctttgtttttaattatgggcatgggatggtggttgaggcaaatgatgatgaagattggggatgactggcccctagttgctctaggacttccttctccatctggacatgggggcaggagggagctaaacctaggaccaggatatctccctcctgttttcccaacctcatcatgagcctgtttgccctccagcccctggacgggttgggtggggggtagggtgagggctatccctgagtggcatgcccatacctagtgaggcagggtgtggcccggagctcccactttccctcagtcaccaaactgctgctggtctggtgggaaggggtggtgatgtgggggtgggggagcttagtgtcagcgcggggagggtggggggtatttatctatttatacatgggattgtacatagtcttgtggggcatgggggagccggctggaggtgagaaccctcccctctccccccaccccccggggagagcaaatgtaaaactactaatttttgtgctttatatattctatataaatatatctattttctttttacaaaaccagtttataaatggtaggggggtgtggggcggacacatggagctccccttgtgggggggccccctccattacccgacctaccgcccttttcctcaccccccaccccactccccaccccctggctgtgactgctgtaagatgggggtatagaggctgggcaattcccaccccctgttgtatagttggactatgttataacgcacaaaagagagctgaccccagggggagccagagggtgatgggttccttgcctccctttccttcccctttctgcccaagcttgtgctgcagttgaacctcttcctgggggtgggagtaggtaaggggtgggtgaggccccaaacccctctctggtagggaaccgtggggatgaagatgaagcttatatgcagttctcttctaggggctgtgggcaaagggcattttgtaattaatattttcaagaatcagatgtctggagtgtaggggtgggcttggtggtggtggacgggcgggcctgctggagggggagcttggtcgctgttgtgattttaggtttgtttttgttttgttttgaatttggggggttgtggattgttgggggtagggagattttttttttttaaagctgcttcctcaactgtttcaagctgcaaatgtttaagagaataacagcccccactcccacaggaaccgctgtaattaaatcagacagtaggaagactgggctgctgccctcaaagccacagcccttggatgttccttttccgagagcagaaggtctaggctacagggagggggagattggctcccgtgagtcaggctgtgtttggggcttgggccctgggattgggaaaaggggatggggcagactttgtaagcatatgctaggtatccgatagtcctgtagaatttagtgaagaaaccttatacagtttttaatttttatataaactataactcagacccaagctacaaggttggaattttggttggttttttttttaagtaccctgcctgtataattgcatcagaatcccccaccccaccccccgcccccgtgtttgtattttgggttggtttacactcgcacatactcagttttcagttttcccctttacagtcttctcccctcacctccaggaccctccccctttttaaaaaataaatcgctgacaagtgtgaatcccgtgaagactttattttgtgttgtgtgtatcctgtacagcaaggttggtccttcgtaacaacggatgaaatggttcccttttttaaagcgccctctctccctccaccctcagcgcccctgtccttggcatgttttgtatcagcgatcattctgaactgtacatatttatgttgcgagaggcaaagggcaagttttggattttgcttcttccaagtttgtttttaaacgacaaataaaaaaagaacattttaaatacaa

SEQ ID NO: 135 - DNA, 8490 bp, Homo sapiens
atggcggcggcggcgggcggcggcagttgccccgggcctggctccgcgcggggccgcttcccgggccggccgcggggcgccggcgggggcgggggccgcggcggacggggcaacggggccgaaagagtgcgggtagctctgcggcgcggcggtggcgcgacggggccgggcggagccgagcccggggaggacacggccctgctccgtttgctggggctccgccggggcctgcgccggctccgccgcctgtgggccggcccgcgggtccagcggggccggggacggggtcggggccggggctggggcccgagtcgaggctgcgtgccggaggaggagagcagtgacggggaatccgacgaggaggagtttcagggttttcattcagatgaagatgtggcccccagttccctgcgctctgcgctccgatcccagcgaggtcgagcgccccgaggtcggggtcgcaagcataagacgaccccccttcctcctcctcgcctagcagatgtggctcctacccccccaaagacccctgcccggaaacggggtgaggaaggcacagaacggatggtgcaggcactgactgaacttctccggcgggcccaggcaccccaagcaccccggagccgggcatgtgagccctccaccccccggcggtctcggggacggcccccaggacggccagcaggcccctgcaggaggaagcagcaagcagtagtggtggcagaagcagctgtgacaatccccaaacctgagcccccacctcctgtggttccagtgaaacatcagactggcagctggaaatgcaaggaggggcccggtccaggacctgggacccccaggcgtggaggacagtcaagccgtggaggccgtggaggcaggggccgcggccgaggtggtgggctcccctttgtgatcaagtttgtttcaagggccaaaaaagtaaagatgggacaattgtccttgggactcgaatcaggtcaaggtcaaggtcaacatgaggaaagttggcaggatgtcccccaaagaagagttggatctggacagggagggagcccttgctggaaaaagcaggaacagaagctggatgacgaggaagaagagaagaaagaagaagaagaaaaagacaaggagggagaagagaaggaagaaagagctgtagctgaggagatgatgccagctgcggaaaaggaagaggcaaagctgccaccaccgcctctgactcctccagccccttcacctcctccacccctcccacccccttcgacatctcctccacccccactctgccctccaccaccacccccagtgtccccaccacctctaccatcccctccaccgcctcctgcccaagaggagcaggaggaatcccctcctcctgtggtcccagctacgtgctccaggaagaggggccggcctcccctgactcccagccagcgggcggagcgggaagctgctcgggcagggccagagggcacctctcctcccactccaacccccagcaccgccacgggaggccctccggaagacagtcccaccgtggcccccaaaagcaccaccttcctgaagaatatccggcagtttattatgcctgtggtgagtgcccgctcctcccgtgtcatcaagacaccccggcgatttatggatgaagacccccccaaacccccaaaggtggaggtctcacctgtcctgcgacctcccattaccacctccccacctgttccccaggagccagcaccagtcccctctccaccacgtgccccaactcctccatctaccccagttccactccctgagaagagacggtccatcctaagggaacccacatttcgctggacctcactgacccgggagctgccccctcctcccccagcccctccacctcccccggccccctccccaccccctgctcctgccacctcctcccggaggcccctactccttcgggcccctcagtttaccccaagcgaagcccacctgaagatctacgaatcggtgcttactcctcctcctcttggggctcctgaagcccctgagccagagcctcctcctgccgatgactctccagctgagcctgagcctcgggcagtgggccgcaccaaccacctcagcctgcctcgattcgcccctgtggtcaccactcctgttaaggccgaggtgtcccctcacggggctccagctctgagcaacgggccacagacacaggctcagctactgcagcccctgcaggccttgcaaacccagctcctgccccaggcactaccgccaccacagccacagctgcagccaccgccgtcaccacagcagatgcctcccctggaaaaagcccggattgcgggcgtgggttccttgccgctgtctggggtagaggagaagatgttcagcctcctcaagagagccaaagtgcagctattcaagatcgatcagcagcagcagcagaaggtggcagcttccatgccgctgagccctggagggcagatggaggaggtggccggggctgtcaagcagatctccgacagaggccctgtccggtctgaagatgagtcggtggaagctaagagagagcggccctcaggtcccgagtcccctgtgcaaggtccccgcatcaaacatgtctgccgtcatgctgctgtggccctgggtcaggcccgggccatggtgcctgaagatgtccctcgcctcagtgccctccctctccgggatcggcaggacctcgccacagaggatacatcatcggcgtccgagactgagagtgtcccgtcacggtcccggcggggaaaggtggaggcagcaggccctgggggagaatcagagcccacaggttctggagggaccctggcccacacaccccggcgctcactgccctcccatcacggcaagaagatgcgcatggctcgatgtggacactgtcggggctgcctacgtgtgcaggactgtgggtcctgtgtcaactgcctagacaagcccaagtttgggggccctaacaccaagaagcagtgctgtgtataccggaagtgtgacaaaatagaggctcggaagatggaacgactggctaaaaaaggccggacgatagtgaagacgctgttgccctgggattccgatgaatctcctgaggcctcccctggtcctccaggcccacgccggggggcgggagctggggggccccgggaggaggtggtggcccacccagggcccgaggagcaggactccctcctgcagcgcaagtcagctcggcgctgcgtcaaacagcgaccctcctatgatatcttcgaggattcggatgactcggagcccgggggcccccctgctcctcggcgtcggaccccccgagaaaatgagctgccactgccagaacctgaggagcagagccggccccgcaaacctaccctgcagcctgtgttgcagctcaaggcccgaaggcgcctggacaaggatgctttggcccctggcccctttgcttcttttcccaatggctggactggaaagcagaagtctcccgatggtgtgcaccgcgtccgtgtggattttaaggaggattgtgatttagagaacgtgtggctgatggggggcctgagtgtgctcacctctgtgccagggggccccccgatggtgtgcttgctgtgtgccagcaaaggactccacgagctggtgttctgtcaagtctgctgtgacccattccacccattctgcctggaggaggccgagcggcccctgccccagcatcacgacacctggtgctgccgtcgctgcaaattctgccacgtctgtggacgcaaaggtcgtggatccaagcacctcctggagtgcgagcgctgccgccatgcataccacccggcctgtctggggcccagctatccaacccgggccacgcgcaaacggcgccactggatctgttcagcctgtgtgcgctgtaagagctgtggggcaactccaggcaagaactgggacgtcgagtggtctggagattacagcctctgccccaggtgcacccagctatatgagaaaggaaactactgcccgatctgtacacgctgctatgaagacaacgactatgagagcaagatgatgcagtgcgcacagtgcgatcactgggtgcatgccaagtgcgaggggctctcagatgaagactacgagatcctttcaggactgccagactcggtgctgtacacctgcggaccgtgtgctggggcagcgcagccccgctggcgagaggccctgagcggggccctccaggggggcctgcgccaggtgctccagggcctgctgagctccaaggtggtgggcccactgctgctctgcacccagtgtgggccagatgggaagcaactgcacccaggaccctgcggcctgcaagctgtgagtcagcgcttcgaggatggccactacaagtctgtgcacagcttcatggaggacatggtgggcatcctcatgcggcactcggaggagggagagaccccggaccgccgggctggaggccagatgaaggggctcctgctgaagctgctagaatctgcgttcggctggttcgacgcccacgaccccaagtactggcgacggagtacccggctgccaaacggagtccttcccaatgcggtgttgcccccatccctggatcatgtctatgcgcagtggagacagcaggaaccagagaccccagaatcagggcagcctccaggggatccctcagcagcattccagggcaaggatccggctgccttctcacacctggaggacccccgtcagtgtgcactctgcctcaaatacggggatgcagactccaaggaggcggggcggctcttgtacatcgggcagaacgagtggacacacgtcaactgtgccatctggtcggcggaagtcttcgaggagaacgacggctccctcaagaatgtgcatgctgctgtggcccgagggaggcagatgcgctgcgagctctgcctgaagcctggcgccacggtgggctgctgcctgtcctcctgcctcagcaacttccacttcatgtgtgcccgggccagctactgcatcttccaggatgacaagaaagtcttctgccagaaacacactgatctcctggatggcaaggaaattgtgaaccccgatggttttgatgttctccgccgagtctatgtggacttcgagggcatcaacttcaagcggaagttcttgacggggcttgaacccgatgccatcaacgtgctcattggttccatccgcattgactccctgggtactctgtctgatctctcggactgcgagggacggctcttccccattggctaccagtgctcccgtctgtactggagcacagtggatgctcggaggcgctgctggtatcggtgccgaattctggagtatcggccatgggggccgagggaagagccagctcacctggaggctgcagaggagaaccagaccattgtgcacagccccgccccttcctcagagcccccaggtggtgaggaccccccactggacacagatgttcttgtccctggagctcctgagcgccactcgcccattcagaacctggaccctccactgcggccagattcaggcagcgcccctcctccagccccccgttctttttcgggggctcgaatcaaagtgcccaactactcgccatcccggaggcccttggggggtgtctcctttggccccctgccctcccctggaagtccatcttcactgacccaccacatccccacagtgggagacccggacttcccagctccccccagacgttcccgtcgtcccagccctttggctcccaggccgcctccatcacggtgggcctcccctcctctaaaaacctcccctcagctcagggtgccccctcctacctcagtcgtcacagccctcacacctacctcaggggagctggctccccctggcccggccccatctccaccaccccctgaagacctgggcccagacttcgaggacatggaggtggtgtcaggactgagtgctgctgacctggacttcgcggccagcctgctggggactgagcccttccaggaagagattgtagccgctggggccatggggagcagccacgggggcccgggggacagctccgaggaggagtccagccccacctcccgctacatccacttccctgtgactgtggtgtccgcccctggtctggcccccagcgctacccctggagccccccgcattgaacagctggacggcgtggacgacggcactgacagtgaggctgaggcggtgcagcagcctcggggccagggcacgcctccttcggggccaggagtagtccgggcaggggtccttggggctgcaggggacagggcccggcctcctgaggacctgccatcggaaattgtggattttgtgttgaagaacctagggggtcctggggatggaggtgctggccctagagaggagtcactccccccggcgcctcccctggctaatggcagccagccctcccaaggcctgaccgccagcccagctgaccccacccgcacatttgcctggctcccaggggccccaggggtccgggtgttaagccttggccctgcccctgagccccccaaacccgccacatccaaaatcatacttgtcaacaagctggggcaagtatttgtgaagatggctggggagggtgaacctgtcccacccccagtgaagcagccacctttgccccccaccatttcccccacggctcccacctcctggactctgcccccaggccccctcctcggcgtgctgcccgtggtcggagtggtccgccctgccccgcccccgccaccccctcccctgacgctggtgctgagcagtgggccagccagcccgccccgccaggccatccgcgtcaagagggtgtccactttctccggccggtccccgccagcacctcccccatacaaagccccccggctggatgaagatggagaggcctcagaggatacccctcaggttccagggcttggcagtggcgggtttagccgtgtgaggatgaaaacccccacagtgcgtggggtccttgacctggatcggcctggggagcccgctggggaagaaagtcctgggcccctccaggaacggtcccctttgctgccacttccggaagatggtcctccccaggtccccgatggtcccccagacctgctgcttgagtcccagtggcaccactattcaggtgaggcttcgagctctgaggaagagcctccatccccagatgataaagagaaccaggccccaaaacggactggcccacatctgcgcttcgagatcagcagtgaggatgggttcagcgttgaggcagagagcttggagggggcgtggagaactctgatcgagaaagtgcaagaggcccgagggcatgcccgactcagacatctctcctttagtggaatgagtggggcgagactcctgggcatccaccatgatgctgtcatcttcctggccgagcagctccccggagcccagcgttgccagcactataagttccgttaccaccagcagggagagggccaggaggagccgcccctgaatccccatggggctgctcgggcagaggtctatctccggaagtgcacctttgacatgttcaacttcctggcctcccagcaccgggtgctccctgagggggccacctgtgatgaggaagaggatgaggtgcagctcaggtcaaccagacgtgccaccagcctggagctgcccatggccatgcgttttcgtcaccttaagaagacgtccaaagaagctgtgggtgtctacagatcagccatccacgggcgaggcctgttctgtaagcgcaacatcgacgcgggggagatggtcatcgagtactctggcattgtcatccgctcggtgttgactgacaagcgggagaagttctacgatgggaagggcatcgggtgctatatgttccgcatggatgactttgatgtagtggacgccacgatgcatggcaatgccgcccgcttcatcaaccactcctgtgagcccaactgcttctctcgggtcatccacgtggagggccagaaacacattgttatcttcgccctgcgccgcatcctgcgtggtgaggagctcacctacgactacaagttccccatcgaggatgccagcaacaagctgccctgcaactgtggcgccaagcgctgccgtcggttccttaactgaggccgtggctgcccaccacgacccctcacacctcctgctgccgtcgctgccatcttgcccctagcctgggggctccctagcccctcccagagcatctcacccccaccctcatgttcagggtggatgtgggcatgcaggtgacaagggccctgcctccacccctccagcccatccagcaatcgccccctttctgccctgggggcccaggatgtagatattgtacaaaggtttctaaatcccttcttttctatgcacttttttatttaagaggtggggtcccaggtgggaacccccccacaataaagtctgtcaatgtttggagaaaaaaaaaaaaaaaaaaaa

SEQ ID NO: 136 - DNA, 16872 bp, Homo sapiens
gaggtgcgcgcgcccgcgccgatgtgtgtgagtgcgtgtcctgctcgctccatgttgccgcctctcccggtacctgctgctgctcccggggctgcgggaaatgcgagaggctgagccggggaggaggaacccgagcagcagcggcggcggcggcggccgcggcggcgggagccccccaggaggaggaccgggatccatgtgtctttcctggtgactaggatgtcgtcggaggaggacaagagcgtggagcagccgcagccgccgccaccaccccccgaggagcctggagccccggccccgagccccgcagccgcagacaaaagacctcggggccggcctcgcaaagatggcgcttcccctttccagagagccagaaagaaacctcgaagtagggggaaaactgcagtggaagatgaggacagcatggatgggctggagacaacagaaacagaaacgattgtggaaacagaaatcaaagaacaatctgcagaagaggatgctgaagcagaagtggataacagcaaacagctaattccaactcttcagcgatctgtgtctgaggaatcggcaaactccctggtctctgttggtgtagaagccaaaatcagtgaacagctctgcgctttttgttactgtggggaaaaaagttccttaggacaaggagacttaaaacaattcagaataacgcctggatttatcttgccatggagaaaccaaccttctaacaagaaggacattgatgacaacagcaatggaacctatgagaaaatgcaaaactcagcaccacgaaaacaaagaggacagagaaaagaacgatctcctcagcagaatatagtatcttgtgtaagtgtaagcacccagacagcttcagatgatcaagctggtaaactgtgggatgaactcagtctggttgggcttccagatgccattgatatccaagccttatttgattctacaggcacttgttgggctcatcaccgttgtgtggagtggtcactaggagtatgccagatggaagaaccattgttagtgaacgtggacaaagctgttgtctcagggagcacagaacgatgtgcattttgtaagcaccttggagccactatcaaatgctgtgaagagaaatgtacccagatgtatcattatccttgtgctgcaggagccggcacctttcaggatttcagtcacatcttcctgctttgtccagaacacattgaccaagctcctgaaagatcgaaggaagatgcaaactgtgcagtgtgcgacagcccgggagacctcttagatcagttcttttgtactacttgtggtcagcactatcatggaatgtgcctggatatagcggttactccattaaaacgtgcaggttggcaatgtcctgagtgcaaagtgtgccagaactgcaaacaatcgggagaagatagcaagatgctagtgtgtgatacgtgtgacaaagggtatcatactttttgtcttcaaccagttatgaaatcagtaccaaccaatggctggaaatgcaaaaattgcagaatatgtatagagtgtggcacacggtctagttctcagtggcaccacaattgcctgatatgtgacaattgttaccaacagcaggataacttatgtcccttctgtgggaagtgttatcatccagaattgcagaaagacatgcttcattgtaatatgtgcaaaaggtgggttcacctagagtgtgacaaaccaacagatcatgaactggatactcagctcaaagaagagtatatctgcatgtattgtaaacacctgggagctgagatggatcgtttacagccaggtgaggaagtggagatagctgagctcactacagattataacaatgaaatggaagttgaaggccctgaagatcaaatggtattctcagagcaggcagctaataaagatgtcaacggtcaggagtccactcctggaattgttccagatgcggttcaagtccacactgaagagcaacagaagagtcatccctcagaaagtcttgacacagatagtcttcttattgctgtatcatcccaacatacagtgaatactgaattggaaaaacagatttctaatgaagttgatagtgaagacctgaaaatgtcttctgaagtgaagcatatttgtggcgaagatcaaattgaagataaaatggaagtgacagaaaacattgaagtcgttacacaccagatcactgtgcagcaagaacaactgcagttgttagaggaacctgaaacagtggtatccagagaagaatcaaggcctccaaaattagtcatggaatctgtcactcttccactagaaaccttagtgtccccacatgaggaaagtatttcattatgtcctgaggaacagttggttatagaaaggctacaaggagaaaaggaacagaaagaaaattctgaactttctactggattgatggactctgaaatgactcctacaattgagggttgtgtgaaagatgtttcataccaaggaggcaaatctataaagttatcatctgagacagagtcatcattttcatcatcagcagacataagcaaggcagatgtgtcttcctccccaacaccttcttcagacttgccttcgcatgacatgctgcataattacccttcagctcttagttcctctgctggaaacatcatgccaacaacttacatctcagtcactccaaaaattggcatgggtaaaccagctattactaagagaaaattttctcctggtagacctcggtccaaacagggggcttggagtacccataatacagtgagcccaccttcctggtccccagacatttcagaaggtcgggaaatttttaaacccaggcagcttcctggcagtgccatttggagcatcaaagtgggccgtgggtctggatttccaggaaagcggagacctcgaggtgcaggactgtcggggcgaggtggccgaggcaggtcaaagctgaaaagtggaatcggagctgttgtattacctggggtgtctactgcagatatttcatcaaataaggatgatgaagaaaactctatgcacaatacagttgtgttgttttctagcagtgacaagttcactttgaatcaggatatgtgtgtagtttgtggcagttttggccaaggagcagaaggaagattacttgcctgttctcagtgtggtcagtgttaccatccatactgtgtcagtattaagatcactaaagtggttcttagcaaaggttggaggtgtcttgagtgcactgtgtgtgaggcctgtgggaaggcaactgacccaggaagactcctgctgtgtgatgactgtgacataagttatcacacctactgcctagaccctccattgcagacagttcccaaaggaggctggaagtgcaaatggtgtgtttggtgcagacactgtggagcaacatctgcaggtctaagatgtgaatggcagaacaattacacacagtgcgctccttgtgcaagcttatcttcctgtccagtctgctatcgaaactatagagaagaagatcttattctgcaatgtagacaatgtgatagatggatgcatgcagtttgtcagaacttaaatactgaggaagaagtggaaaatgtagcagacattggttttgattgtagcatgtgcagaccctatatgcctgcgtctaatgtgccttcctcagactgctgtgaatcttcacttgtagcacaaattgtcacaaaagtaaaagagctagacccacccaagacttatacccaggatggtgtgtgtttgactgaatcagggatgactcagttacagagcctcacagttacagttccaagaagaaaacggtcaaaaccaaaattgaaattgaagattataaatcagaatagcgtggccgtccttcagacccctccagacatccaatcagagcattcaagggatggtgaaatggatgatagtcgagaaggagaacttatggattgtgatggaaaatcagaatctagtcctgagcgggaagctgtggatgatgaaactaagggagtggaaggaacagatggtgtcaaaaagagaaaaaggaaaccatacagaccaggtattggtggatttatggtgcggcaaagaagtcgaactgggcaagggaaaaccaaaagatctgtgatcagaaaagattcctcaggctctatttccgagcagttaccttgcagagatgatggctggagtgagcagttaccagatactttagttgatgaatctgtttctgttactgaaagcactgaaaaaataaagaagagataccgaaaaaggaaaaataagcttgaagaaactttccctgcctatttacaagaagctttctttggaaaagatcttctagatacaagtagacaaagcaagataagtttagataatctgtcagaagatggagctcagcttttatataaaacaaacatgaacacaggtttcttggatccttccttagatccactacttagttcatcctcggctccaacaaaatctggaactcacggtcctgctgatgacccattagctgatatttctgaagttttaaacacagatgatgacattcttggaataatttcagatgatctagcaaaatcagttgatcattcagatattggtcctgtcactgatgatccttcctctttgcctcagccaaatgtcaatcagagttcacgaccattaagtgaagaacagctagatgggatcctcagtcctgaactagacaaaatggtcacagatggagcaattcttggaaaattatataaaattccagagcttggcggaaaagatgttgaagacttatttacagctgtacttagtcctgcgaacactcagccaactccattgccacagcctcccccaccaacacagctgttgccaatacacaatcaggatgctttttcacggatgcctctcatgaatggccttattggatccagtcctcatctcccacataattctttgccacctggaagcggactgggaactttctctgcaattgcacaatcctcttatcctgatgccagggataaaaattcagcctttaatccaatggcaagtgatcctaacaactcttggacatcatcagctcccactgtggaaggagaaaatgacacaatgtcgaatgcccagagaagcacgcttaagtgggagaaagaggaggctctgggtgaaatggcaactgttgccccagttctctacaccaatattaatttccccaacttaaaggaagaattccctgattggactactagagtgaagcaaattgccaaattgtggagaaaagcaagctcacaagaaagagcaccatatgtgcaaaaagccagagataacagagctgctttacgcattaataaagtacagatgtcaaatgattccatgaaaaggcagcaacagcaagatagcattgatcccagctctcgtattgattcggagctttttaaagatcctttaaagcaaagagaatcagaacatgaacaggaatggaaatttagacagcaaatgcgtcagaaaagtaagcagcaagctaaaattgaagccacacagaaacttgaacaggtgaaaaatgagcagcagcagcagcaacaacagcaatttggttctcagcatcttctggtgcagtctggttcagatacaccaagtagtgggatacagagtcccttgacacctcagcctggcaatggaaatatgtctcctgcacagtcattccataaagaactgtttacaaaacagccacccagtacccctacgtctacatcttcagatgatgtgtttgtaaagccacaagctccacctcctcctccagccccatcccggattcccatccaggatagtctttctcaggctcagacttctcagccaccctcaccgcaagtgttttcacctgggtcctctaactcacgaccaccatctccaatggatccatatgcaaaaatggttggtacccctcgaccacctcctgtgggccatagtttttccagaagaaattctgctgcaccagtggaaaactgtacacctttatcatcggtatctaggccccttcaaatgaatgagacaacagcaaataggccatcccctgtcagagatttatgttcttcttccacgacaaataatgacccctatgcaaaacctccagacacacctaggcctgtgatgacagatcaatttcccaaatccttgggcctatcccggtctcctgtagtttcagaacaaactgcaaaaggccctatagcagctggaaccagtgatcactttactaaaccatctcctagggcagatgtgtttcaaagacaaaggatacctgactcatatgcacgacccttgttgacacctgcacctcttgatagtggtcctggaccttttaagactccaatgcaacctcctccatcctctcaggatccttatggatcagtgtcacaggcatcaaggcgattgtctgttgacccttatgaaaggcctgctttgacaccaagacctatagataatttttctcataatcagtcaaatgatccatatagtcagcctccccttaccccacatccagcagtgaatgaatcttttgcccatccttcaagggctttttcccagcctggaaccatatcaaggccaacatctcaggacccatactcccaacccccaggaactccacgacctgttgtagattcttattcccaatcttcaggaacagctaggtccaatacagacccttactctcaacctcctggaactccccggcctactactgttgacccatatagtcagcagccccaaaccccaagaccatctacacaaactgacttgtttgttacacctgtaacaaatcagaggcattctgatccatatgctcatcctcctggaacaccaagacctggaatttctgtcccttactctcagccaccagcaacaccaaggccaaggatttcagagggttttactaggtcctcaatgacaagaccagtcctcatgccaaatcaggatcctttcctgcaagcagcacaaaaccgaggaccagctttacctggcccgttggtaaggccacctgatacatgttcccagacacctaggccccctggacctggtctttcagacacatttagccgtgtttccccatctgctgcccgtgatccctatgatcagtctccaatgactccaagatctcagtctgactcttttggaacaagtcaaactgcccatgatgttgctgatcagccaaggcctggatcagaggggagcttctgtgcatcttcaaactctccaatgcactcccaaggccagcagttctctggtgtctcccaacttcctggacctgtgccaacttcaggagtaactgatacacagaatactgtaaatatggcccaagcagatacagagaaattgagacagcggcagaagttacgtgaaatcattctccagcagcaacagcagaagaagattgcaggtcgacaggagaaggggtcacaggactcacccgcagtgcctcatccagggcctcttcaacactggcaaccagagaatgttaaccaggctttcaccagacccccacctccctatcctgggaacattaggtctcctgttgcccctcctttaggacctagatatgctgttttcccaaaagatcagcgtggaccctatcctcctgatgttgctagtatggggatgagacctcatggatttagatttggatttccaggaggtagtcatggtaccatgccgagtcaagagcgcttccttgtgcctcctcagcaaatacagggatctggagtttctccacagctaagaagatcagtatctgtagatatgcctaggcctttaaataactcacaaatgaataatccagttggacttcctcagcatttttcaccacagagcttgccagttcagcagcacaacatactgggccaagcatatattgaactgagacatagggctcctgacggaaggcaacggctgcctttcagtgctccacctggcagcgttgtagaggcatcttctaatctgagacatggaaacttcattccccggccagactttccgggccctagacacacagaccccatgcgacgacctccccagggtctacctaatcagctacctgtgcacccagatttggaacaagtgccaccatctcaacaagagcaaggtcattctgtccattcatcttctatggtcatgaggactctgaaccatccactaggtggtgaattttcagaagctcctttgtcaacatctgtaccgtctgaaacaacgtctgataatttacagataaccacccagccttctgatggtctagaggaaaaacttgattctgatgacccttctgtgaaggaactggatgttaaagaccttgagggggttgaagtcaaagacttagatgatgaagatcttgaaaacttaaatttagatacagaggatggcaaggtagttgaattggatactttagataatttggaaactaatgatcccaacctggatgacctcttaaggtcaggagagtttgatatcattgcatatacagatccagaacttgacatgggagataagaaaagcatgtttaatgaggaactagaccttccaattgatgataagttagataatcagtgtgtatctgttgaaccaaaaaaaaaggaacaagaaaacaaaactctggttctctctgataaacattcaccacagaaaaaatccactgttaccaatgaggtaaaaacggaagtactgtctccaaattctaaggtggaatccaaatgtgaaactgaaaaaaatgatgagaataaagataatgttgacactccttgctcacaggcttctgctcactcagacctaaatgatggagaaaagacttctttgcatccttgtgatccagatctatttgagaaaagaaccaatcgagaaactgctggccccagtgcaaatgtcattcaggcatccactcaactacctgctcaagatgtaataaactcttgtggcataactggatcaactccagttctctcaagtttacttgctaatgagaaatctgataattcagacattaggccatcggggtctccaccaccaccaactctgccggcctccccatccaatcatgtgtcaagtttgcctcctttcatagcaccgcctggccgtgttttggataatgccatgaattctaatgtgacagtagtctctagggtaaaccatgttttttctcagggtgtgcaggtaaacccagggctcattccaggtcaatcaacagttaaccacagtctggggacaggaaaacctgcaactcaaactgggcctcaaacaagtcagtctggtaccagtagcatgtctggaccccaacagctaatgattcctcaaacattagcacagcagaatagagagaggccccttcttctagaagaacagcctctacttctacaggatcttttggatcaagaaaggcaagaacagcagcagcaaagacagatgcaagccatgattcgtcagcgatcagaaccgttcttccctaatattgattttgatgcaattacagatcctataatgaaagccaaaatggtggcccttaaaggtataaataaagtgatggcacaaaacaatctgggcatgccaccaatggtgatgagcaggttcccttttatgggccaggtggtaactggaacacagaacagtgaaggacagaaccttggaccacaggccattcctcaggatggcagtataacacatcagatttctaggcctaatcctccaaattttggtccaggctttgtcaatgattcacagcgtaagcagtatgaagagtggctccaggagacccaacagctgcttcaaatgcagcagaagtatcttgaagaacaaattggtgctcacagaaaatctaagaaggccctttcagctaaacaacgtactgccaagaaagctgggcgtgaatttccagaggaagatgcagaacaactcaagcatgttactgaacagcaaagcatggttcagaaacagctagaacagattcgtaaacaacagaaagaacatgctgaattgattgaagattatcggatcaaacagcagcagcaatgtgcaatggccccacctaccatgatgcccagtgtccagccccagccacccctaattccaggtgccactccacccaccatgagccaacccacctttcccatggtgccacagcagcttcagcaccagcagcacacaacagttatttctggccatactagccctgttagaatgcccagtttacctggatggcaacccaacagtgctcctgcccacctgcccctcaatcctcctagaattcagcccccaattgcccagttaccaataaaaacttgtacaccagccccagggacagtctcaaatgcaaatccacagagtggaccaccacctcgggtagaatttgatgacaacaatccctttagtgaaagttttcaagaacgggaacgtaaggaacgtttacgagaacagcaagagagacaacggatccaactcatgcaggaggtagatagacaaagagctttgcagcagaggatggaaatggagcagcatggtatggtgggctctgagataagtagtagtaggacatctgtgtcccagattcccttctacagttccgacttaccttgtgattttatgcaacctctaggaccccttcagcagtctccacaacaccaacagcaaatggggcaggttttacagcagcagaatatacaacaaggatcaattaattcaccctccacccaaactttcatgcagactaatgagcgaaggcaggtaggccctccttcatttgttcctgattcaccatcaatccctgttggaagcccaaatttttcttctgtgaagcagggacatggaaatctttctgggaccagcttccagcagtccccagtgaggccttcttttacacctgctttaccagcagcacctccagtagctaatagcagtctcccatgtggccaagattctactataacccatggacacagttatccgggatcaacccaatcgctcattcagttgtattctgatataatcccagaggaaaaagggaaaaagaaaagaacaagaaagaagaaaagagatgatgatgcagaatccaccaaggctccatcaactccccattcagatataactgccccaccgactccaggcatctcagaaactacctctactcctgcagtgagcacacccagtgagcttcctcaacaagccgaccaagagtcggtggaaccagtcggcccatccactcccaatatggcagcaggccagctatgtacagaattagagaacaaactgcccaatagtgatttctcacaagcaactccaaatcaacagacgtatgcaaattcagaagtagacaagctctccatggaaacccctgccaaaacagaagagataaaactggaaaaggctgagacagagtcctgcccaggccaagaggagcctaaattggaggaacagaatggtagtaaggtagaaggaaacgctgtagcctgtcctgtctcctcagcacagagtcctccccattctgctggggcccctgctgccaaaggagactcagggaatgaacttctgaaacacttgttgaaaaataaaaagtcatcttctcttttgaatcaaaaacctgagggcagtatttgttcagaagatgactgtacaaaggataataaactagttgagaagcagaacccagctgaaggactgcaaactttgggggctcaaatgcaaggtggttttggatgtggcaaccagttgccaaaaacagatggaggaagtgaaaccaagaaacagcgaagcaaacggactcagaggacgggtgagaaagcagcacctcgctcaaagaaaaggaaaaaggacgaagaggagaaacaagctatgtactctagcactgacacgtttacccacttgaaacagcagaataatttaagtaatcctccaacaccccctgcctctcttcctcctacaccacctcctatggcttgtcagaagatggccaatggttttgcaacaactgaagaacttgctggaaaagccggagtgttagtgagccatgaagttaccaaaactctaggacctaaaccatttcagctgcccttcagaccccaggacgacttgttggcccgagctcttgctcagggccccaagacagttgatgtgccagcctccctcccaacaccacctcataacaatcaggaagaattaaggatacaggatcactgtggtgatcgagatactcctgacagttttgttccctcatcctctcctgagagtgtggttggggtagaagtgagcaggtatccagatctgtcattggtcaaggaggagcctccagaaccggtgccgtcccccatcattccaattcttcctagcactgctgggaaaagttcagaatcaagaaggaatgacatcaaaactgagccaggcactttatattttgcgtcaccttttggtccttccccaaatggtcccagatcaggtcttatatctgtagcaattactctgcatcctacagctgctgagaacattagcagtgttgtggctgcattttccgaccttcttcacgtccgaatccctaacagctatgaggttagcagtgctccagatgtcccatccatgggtttggtcagtagccacagaatcaacccgggtttggagtatcgacagcatttacttctccgtgggcctccgccaggatctgcaaaccctcccagattagtgagctcttaccggctgaagcagcctaatgtaccatttcctccaacaagcaatggtctttctggatataaggattctagtcatggtattgcagaaagcgcagcactcagaccacagtggtgttgtcattgtaaagtggttattcttggaagtggtgtgcggaaatctttcaaagatctgacccttttgaacaaggattcccgagaaagcaccaagagggtagagaaggacattgtcttctgtagtaataactgctttattctttattcatcaactgcacaagcgaaaaactcagaaaacaaggaatccattccttcattgccacaatcacctatgagagaaacgccttccaaagcatttcatcagtacagcaacaacatctccactttggatgtgcactgtctcccccagctcccagagaaagcttctccccctgcctcaccacccatcgccttccctcctgcttttgaagcagcccaagtcgaggccaagccagatgagctgaaggtgacagtcaagctgaagcctcggctaagagctgtccatggtgggtttgaagattgcaggccgctcaataaaaaatggagaggaatgaaatggaagaagtggagcattcatattgtaatccctaaggggacatttaaaccaccttgtgaggatgaaatagatgaatttctaaagaaattgggcacttcccttaaacctgatcctgtgcccaaagactatcggaaatgttgcttttgtcatgaagaaggtgatggattgacagatggaccagcaaggctactcaaccttgacttggatctgtgggtccacttgaactgcgctctgtggtccacggaggtctatgagactcaggctggtgccttaataaatgtggagctagctctgaggagaggcctacaaatgaaatgtgtcttctgtcacaagacgggtgccactagtggatgccacagatttcgatgcaccaacatttatcacttcacttgcgccattaaagcacaatgcatgttttttaaggacaaaactatgctttgccccatgcacaaaccaaagggaattcatgagcaagaattaagttactttgcagtcttcaggagggtctatgttcagcgtgatgaggtgcgacagattgctagcatcgtgcaacgaggagaacgggaccatacctttcgcgtgggtagcctcatcttccacacaattggtcagctgcttccacagcagatgcaagcattccattctcctaaagcactcttccctgtgggctatgaagccagccggctgtactggagcactcgctatgccaataggcgctgccgctacctgtgctccattgaggagaaggatgggcgcccagtgtttgtcatcaggattgtggaacaaggccatgaagacctggttctaagtgacatctcacctaaaggtgtctgggataagattttggagcctgtggcatgtgtgagaaaaaagtctgaaatgctccagcttttcccagcgtatttaaaaggagaggatctgtttggcctgaccgtctctgcagtggcacgcatagcggaatcacttcctggggttgaggcatgtgaaaattataccttccgatacggccgaaatcctctcatggaacttcctcttgccgttaaccccacaggttgtgcccgttctgaacctaaaatgagtgcccatgtcaagaggtttgtgttaaggcctcacaccttaaacagcaccagcacctcaaagtcatttcagagcacagtcactggagaactgaacgcaccttatagtaaacagtttgttcactccaagtcatcgcagtaccggaagatgaaaactgaatggaaatccaatgtgtatctggcacggtctcggattcaggggctgggcctgtatgctgctcgagacattgagaaacacaccatggtcattgagtacatcgggactatcattcgaaacgaagtagccaacaggaaagagaagctttatgagtctcagaaccgtggtgtgtacatgttccgcatggataacgaccatgtgattgacgcgacgctcacaggagggcccgcaaggtatatcaaccattcgtgtgcacctaattgtgtggctgaagtggtgacttttgagagaggacacaaaattatcatcagctccagtcggagaatccagaaaggagaagagctctgctatgactataagtttgactttgaagatgaccagcacaagattccgtgtcactgtggagctgtgaactgccggaagtggatgaactgaaatgcattccttgctagctcagcgggcggcttgtccctaggaagaggcgattcaacacaccattggaattttgcagacagaaagagatttttgttttctgttttatgactttttgaaaaagcttctgggagttctgatttcctcagtcctttaggttaaagcagcgccaggaggaagctgacagaagcagcgttcctgaagtggccgaggttaaacggaatcacagaatggtccagcacttttgcttttttttcttttccttttcttttttttttgtttgttttttgttttgtttttcccttgtgggtgggtttcattgttttggttttctagtctcactaaggagaaacttttactggggcaaagagccgatggctgccctgccccgggcaggggccttcctatgaatgtaagactgaaatcaccagcgagggggacagagagtgctggccacggccttattaaaaaggggcaggccctctaacttcaaaatgtttttaaataaagtagacaccactgaacaaggaatgtactgaaatgacttccttagggatagagctaagggataataacttgcactaaatacatttaaatacttgattccatgagtcagtttattgtagtttttgatttctgtaaaataagagaaacttttgtatttattattgaataagtgaatgaagctatttttaaataaagttagaagaaagccaagctgctgctgttacctgcagaactaacaaaccctgttactttgtacagatatgtaaatattttgagaaaaaatacagtataaaaatagttattgaccaaatgctaccaggctctgcagcagctcgggggcttataaaatgttcatagggatgttacaatataattttgtgttataaaatatgccattataattatgtaataaccaaaatttcaacctagagtgttgggggttttttggaaaccgcagtctattagtactcaatggttttatacaccttacttctgacagagcggggcgtatgctacgactacaacttttatagctgttttggtaatttaaactaattttttcatattatattgttgcatccctacttcttcagtcaggtttttttgtgcttacaatttgtgataactgtgaataactgcttaaaaatacacccaaatggaggctgaattttttcttcagcaaaagtagttttgattagaactttgtttcagccacagagaatcatgtaaacgtaataggatcatgtagcagaaacttaaatctaaccctttagccttctatttaacacaaaaatttgaaaaagttaaaaaaaaaaaggagatgtgattatgcttacagctgcaggactctggcaatagggtttttggaagatgtaattttaaaatgtgtttgtatgaactgtttgtttacatttctttaataaaaaaaacactgttttgtgtttgcttgtagaaacttaatcagcattttgaaccaggttagctttttattttgtacttaaaattctggtactgacacttcacaggctaagtataaaatgaagttttgtgtgcacaattcaagtggactgtaaactgttggtatattcagtgatgcagttctgaacttgtatatggcatgatgtatttttatcttacagaataaatcaattgtatatatttttctcttgataaatagctgtatgaaatttgtttcctgaatatttttcttctcttgtacaatatcctgacatcctaccagtatttgtcctaccgggtttttgttgttttctgttctgtataatagtatctaatgttggcaaaaattgaattttttgaagtatacagagtgttatgggttttggaatttgtggacacagatttagaagatcaccatttacaaataaaatattttacatctataaaaaaaaaaaa

SEQ ID NO: 137 - DNA, 1546 bp, Homo sapiens
gtcacttcccttcccgcgatggcggcacagggagctgctgcggcggttgcggcggggacttcaggggtcgcgggggagggcgagcccgggcccggggagaatgcggccgctgaggggaccgccccatccccgggccgcgtctctccgccgaccccggcgcgcggcgagccggaagtcacggtggagatcggagaaacgtacctgtgccggcgaccggatagcacctggcattctgctgaagtgatccagtctcgagtgaacgaccaggagggccgagaggaattctatgtacactacgtgggctttaaccggcggctggacgagtgggtagacaagaaccggctggcgctgaccaagacagtgaaggatgctgtacagaagaactcagagaagtacctgagcgagctcgcagagcagcctgagcgcaagatcactcgcaaccaaaagcgcaagcatgatgagatcaaccatgtgcagaagacttatgcagagatggaccccaccacagcagccttggagaaggagcatgaggcgatcaccaaggtgaagtatgtggacaagatccacatcgggaactacgaaattgatgcctggtatttctcaccattccccgaagactatgggaaacagcccaagctctggctctgcgagtactgcctcaagtacatgaaatatgagaagagctaccgcttccacttgggtcagtgccagtggcggcagccccccgggaaagagatctaccgcaagagcaacatctccgtgtacgaagttgatggcaaagaccataagatttactgtcagaacctgtgtctgctggccaagcttttcctggaccataagacactgtactttgacgtggagccgttcgtcttttacatcctgactgaggtggaccggcagggggcccacattgttggctacttctccaaggagaaggagtccccggatggaaacaatgtggcctgcatcctgaccttgcccccctaccaacgccgcggctacgggaagttcctcatcgctttcagttatgagctctccaagctggagagcacagtcggctccccggagaagccactgtctgacctgggcaagctcagctaccgcagctactggtcctgggtgctgctagagatcctgcgggacttccggggcacactgtccatcaaggacctcagccagatgaccagtatcacccaaaatgacatcatcagtaccctgcaatccctcaatatggtcaagtactggaagggccagcacgtgatctgtgtcacacccaagctggtggaggagcacctcaaaagtgcccagtataagaaaccacccatcacagtggactccgtctgcctcaagtgggcaccccccaagcacaagcaagtcaagctctccaagaagtgagcagcctggcccctgctgtcggacctgagcctcctggctcccagcctgtaaatatgtatagacctgttttgtcatttttttaataaagtcagttctggtggccctggactttggaggggaaggggaggccaagaaaaaaaaaaaaaaaaaa

SEQ ID NO: 138 - DNA, 5941 bp, Homo sapiens
gtgtgacacaattacaacaactttgtgctggtgccggggaagtttgtgtctccaacgaatcccctcagtgctccccagccccgcgcgctccggccgttcccgccgtccccgcctgtggctgccccctgcccaaccccgcgatgtgaccctacagccgaaagccgccgctgccgacccgggggctccgcagcccctgccgccgccgccgccgccttcaccgccgccgcgttgggatttttcgtcgccgccgcccgcggcggaggaggaggcggcgataaagttggtgtgctggtcccgcgcgcagattgggggcgtcactgcgggccccggtccgagggggggtgtcggcgttggagttgtgaattcgctgcgtttccatgaaatcctgcggagtgtcgctcgctaccgccgccgctgccgccgccgctttcggtgatgaggaaaagaaaatggcggcgggaaaagcgagcggcgagagcgaggaggcgtcccccagcctgacagccgaggagagggaggcgctcggcggactggacagccgcctctttgggttcgtgagatttcatgaagatggcgccaggacgaaggccctactgggcaaggctgttcgctgctatgaatctctaatcttaaaagctgaaggaaaagtggagtctgatttcttttgtcaattaggtcacttcaacctcttattggaagattatccaaaagcattatctgcataccagaggtactacagtttacagtctgactactggaagaatgctgcctttttatatggtcttggtttggtctacttccattataatgcatttcagtgggcaattaaagcatttcaggaggtgctttatgttgatcccagcttttgtcgagccaaggaaattcatttacgacttgggcttatgttcaaagtgaacacagactatgagtctagtttaaagcattttcagttagctttggttgactgtaatccctgcactttgtccaatgctgaaattcaatttcacattgcccacttatatgaaacccagaggaaatatcattctgcaaaagaagcttatgaacaacttttgcagacagagaatctttctgcacaagtaaaagcaactgtcttacaacagttaggttggatgcatcacactgtagatctcctgggagataaagccaccaaggaaagctatgctattcagtatctccaaaagtccttggaagcagatcctaattctggccagtcctggtatttcctcggaaggtgctattcaagtattgggaaagttcaggatgcctttatatcttacaggcagtctattgataaatcagaagcaagtgcagatacatggtgttcaataggtgtgctatatcagcagcaaaatcagcccatggatgctttacaggcctatatttgtgctgtacaattggaccatggccatgctgcagcctggatggacctaggcactctctatgaatcctgcaaccagcctcaggatgccattaaatgctacttaaatgcaactagaagcaaaagttgtagtaatacctctgcacttgcagcacgaattaagtatttacaggctcagttgtgtaaccttccacaaggtagtctacagaataaaactaaattacttcctagtattgaggaggcgtggagcctaccaattcccgcagagcttacctccaggcagggtgccatgaacacagcacagcaggcatgtaaacctcatcatccaaatactgaacctgtattaggcctcagtcaaacaccaatttcacagcaatccttgccactacacatgattccttctagccaagtagatgacctgtccagtcctgccaagaggaaaagaacatctagtccaacaaagaatacttctgacaattggagtggtggacatgctgtgtcacatcctccagtacagcaacaagctcattcatggtgtttgacaccacagaaattacagcatttggaacagctccgcgcaaatagaaataatttaaatccagcacagaaactgatgctggaacagctggaaagtcagtttgtcttaatgcaacaacaccaaatgagaccaacaggagttgcacaggtacgatctactggaattcctaatgggccaacagctgactcatcactgcctacaaactcagtctctggccagcagccacagcttgctctgaccagagtgcctagcgtctctcagcctggagtccgtcctgcctgccctgggcagcctttggccaatggacccttttctgcaggccatgttccctgtagcacatcaagaacgctgggaagtacagacactattttgataggcaataatcatataacaggaagtggaagtaatggaaacgtgccttacctgcagcgaaacgcactcactctacctcataaccgcacaaacctgaccagcagcgcagaggagccgtggaaaaaccaactatctaactccactcaggggcttcacaaaggtcagagttcacattcggcaggtcctaatggtgaacgacctctctcttccactgggccttcccagcatctccaggcagctggctctggtattcagaatcagaacggacatcccaccctgcctagcaattcagtaacacagggggctgctctcaatcacctctcctctcacactgctacctcaggtggacaacaaggcattaccttaaccaaagagagcaagccttcaggaaacatattgacggtgcctgaaacaagcaggcacactggagagacacctaacagcactgccagtgtcgagggacttcctaatcatgtccatcagatgacggcagatgctgtttgcagtcctagccatggagattctaagtcaccaggtttactaagttcagacaatcctcagctctctgccttgttgatgggaaaagccaataacaatgtgggtactggaacctgtgacaaagtcaataacatccacccagctgttcatacaaagactgataactctgttgcctcttcaccatcttcagccatttcaacagcaacaccttctccaaaatccactgagcagacaaccacaaacagtgttaccagccttaacagccctcacagtgggctacacacaattaatggagaagggatggaagaatctcagagccccatgaaaacagatctgcttctggttaaccacaaacctagtccacagatcataccatcaatgtctgtgtccatataccccagctcagcagaagttctgaaggcatgcaggaatctaggtaaaaatggcttatctaacagtagcattttgttggataaatgtccacctccaagaccaccatcttcaccataccctcccttgccaaaggacaagttgaatccacctacacctagtatttacttggaaaataaacgtgatgctttctttcctccattacatcaattttgtacaaatccgaacaaccctgttacagtaatacgtggccttgctggagctcttaagttagacctgggacttttctctactaaaactttggtggaagctaacaatgaacatatggtagaagtgaggacacagttgttgcagccagcagatgaaaactgggatcccactggaacaaagaaaatctggcattgtgaaagtaatagatctcatactacaattgctaaatatgcacagtaccaggcctcctcattccaggaatcattgagagaagaaaatgaaaaaagaagtcatcataaagaccactcagatagtgaatctacatcgtcagataattctgggaggaggaggaaaggaccctttaaaaccataaagtttgggaccaatattgacctatctgatgacaaaaagtggaagttgcagctacatgagctgactaaacttcctgcttttgtgcgtgtcgtatcagcaggaaatcttctaagccatgttggtcataccatattgggcatgaacacagttcaactatacatgaaagttccagggagcagaacaccaggtcatcaggaaaataacaacttctgttcagttaacataaatattggcccaggtgactgtgaatggtttgttgttcctgaaggttactggggtgttctgaatgacttctgtgaaaaaaataatttgaatttcctaatgggttcttggtggcccaatcttgaagatctttatgaagcaaatgttccagtgtataggtttattcagcgacctggagatttggtctggataaatgcaggcactgttcattgggttcaggctattggctggtgcaacaacattgcttggaatgttggtccacttacagcctgccagtataaattggcagtggaacggtacgaatggaacaaattgcaaagtgtgaagtcaatagtacccatggttcatctttcctggaatatggcacgaaatatcaaggtctcagatccaaagctttttgaaatgattaagtattgtcttctaagaactctgaagcaatgtcagacattgagggaagctctcattgctgcaggaaaagagattatatggcatgggcggacaaaagaagaaccagctcattactgtagcatttgtgaagtggaggtttttgatctgctttttgtcactaatgagagtaattcacgaaagacctacatagtacattgccaagattgtgcacgaaaaacaagcggaaacttggaaaactttgtggtgctagaacagtacaaaatggaggacctgatgcaagtctatgaccaatttacattagctcctccattaccatccgcctcatcttgatattgttccatggacattaaatgagaccttttctgctattcaggaaataacccagttctgcaccactggtttttgtagctatctcgtaaggctgctggctgaaaactgtgtctatgcaaccttccaagtgcggagtgtcaaccaactggacgggagagagtactgctcctactccaggactctcacaaagctgatgagctgtacttcagaaaaaaataataatttccatgttttgtatatatctgacaaaactggcaacatcttacagactactgacttgaagacaacctcttttatatttctctatttctgggctgatgaatttgttttcatctgtcttttcccccttcagaattttccttggaaaaaaaatactagcctagctggtcatttctttgtaaggtagttagcaattttaagtctttctttggtcaacttttttttaatgtgaaaagttaggtaagacacttttttactgcttttatgtttttctgtcttgttttgagaccatgatggttacacttttggttcctaaataaaatttaaaaaattaacagccaagtcacaaaggtaatggattgcacatagactaaggaataaacttcagatttgtgatttttgtttctaatcttgatgtaaatttacactatttataaatacatatttattgcttgaaaatatttgtgaatggaatgctgttattttttccagatttacctgccattgaaattttaaggagttctgtaatttcaaacactactcctattacattttctatgtgtaaataaaactgcttagcattgtacagaaacttttattaaaattgtttaatgtttaaagagttttctattgtttgagttttaaaaaagactttatgtacagtgcccagtttttgttcatttttgaaatctgattatatatattttatatatacttatgtatgtatatataatatatatagaaatctggatatatatgtataaatctttagaacttaaatttttctcgttttaagtttcacatctatggtagatttttgaggtgtctactgtaaagtattgcttacaaaaagtatgattatttttaaagaaatatatatggtatgtatcctcaagacctaaaatgtcagactggtttattgttaagttgcaattactgcaatgacagaccaataaacaattgctgccaaaatgtagtataaa

SEQ ID NO: 139 - DNA, 7071 bp, Homo sapiens
gtgaggccctgccgggtcgggctgcgggcggccgggcgcgggcggcgggacagacgggcgcacgcgaggactgacggacggacgcaccgagggcggcgggcacgcacggcccgggccggcgctccaaggcccgcccgggagggccggggccgcgctcagaattttgatttggctgctgggctgctaccttgaaatccaagccctaaaaatgccagcttctttggacttagaagatgacctggataaatgataaaaattaagaaagagattttgaagttttcttattgtcctcttggcatatgcttctggaataatattcaccatggttttggatgaccttccaaacttagaagacatctatacttccttgtgttcatcaacaatggaagactcagagatggattttgactctggactagaagatgatgacacaaaaagtgatagtattttggaggattccacaatttttgtggccttcaaaggaaatatagatgataaagacttcaaatggaaattagatgcaatattgaaaaacgtgcccaatttgttacacatggagtccagcaagctaaaagtacagaaggtggagccctggaacagcgtgcgtgtgacattcaacatcccccgggaagcagcggagcggctacggatccttgctcagagcaacaaccagcagcttcgggatttagggattctctccgttcagattgaaggggaaggtgctattaacctggctttggctcagaaccgaagccaagatgtgagaatgaatggacccatgggagctggaaattcagttaggatggaggcgggatttcctatggcaagtggtccaggaataataaggatgaacaaccctgccactgttatgatacccccgggtggaaatgtgtcatcttccatgatggcaccaggccccaatccagagctgcagcccaggactcctcgccctgcttctcagtcagatgcaatggatccactcctctctgggctccatatacagcagcaaagtcatccctcaggatctttagctcccccacatcacccaatgcagcctgtctctgtgaacagacaaatgaacccagctaattttccccagctgcagcagcagcagcaacaacaacaacagcagcagcagcagcagcagcagcaacaacagcaacagcagcaacaacagttgcaggcaagacccccacagcaacatcagcagcaacagccacagggaattcgaccccagtttactgccccaactcaggtgcctgttcctccaggctggaaccagctgccttctggagcccttcaacctcctccagcccagggttctctgggcacaatgactgcaaaccaagggtggaagaaggctcccttgcccggcccaatgcaacagcaactccaggcaagaccatccttagccacggtacagacgccttcccaccctccccctccatatccctttggcagccagcaagcctcacaagcccacacaaactttcctcagatgagcaacccaggccagttcacagctcctcagatgaagagtttgcagggagggccctctagggtcccaactcccttgcagcagccccacctcaccaacaagtctcctgcctcctcaccctcctccttccagcagggatcccctgcatcctccccaacggttaaccaaactcagcagcagatgggaccaaggccacctcaaaataacccacttccccagggatttcagcagcctgtcagctctccgggtcggaatcctatggttcaacagggaaatgtgccacctaacttcatggtgatgcagcagcaaccaccaaaccaggggccacagagtttacatccaggcctaggaggaatgcctaaacgcctcccacctggcttctcagcaggacaggccaatccgaactttatgcaaggtcaggtgccttcgaccacagcaaccacccctgggaattcaggagcccctcagctgcaagcaaatcaaaatgtccagcatgcaggtggtcaaggagctggtcctcctcaaaaccagatgcaggtgtcccacgggccgccaaatatgatgcagcccagcctcatgggaattcatggcaacatgaacaatcagcaggctggtacttctggggttcctcaagtgaacctcagcaacatgcaaggccagccccagcagggcccaccatctcagctgatgggcatgcaccagcaaatcgtgccctcccagggccagatggtccagcaacaaggaaccttgaaccctcagaaccctatgatcctttcaagggcccagcttatgccacagggccagatgatggtgaaccccccgagccaaaatcttgggccctcgccccaaaggatgaccccacccaagcagatgctttcccagcagggcccacaaatgatggcgccacataaccagatgatggggcctcaggggcaggttttgctccaacagaacccaatgatagagcagattatgaccaatcaaatgcaggggaataagcagcagtttaacactcagaaccagtccaatgtcatgccgggaccagcccagataatgaggggaccaactccaaacatgcaaggaaatatggtgcagtttacgggacagatgtcaggacagatgctgccccagcaagggcctgtgaacaacagtccatctcaggttatgggcattcagggacaggtcctgcggccaccagggcccagcccacacatggcccagcagcatggtgatcctgctactacagcaaataacgatgtcagtttatctcagatgatgcctgatgttagcattcaacaaaccaacatggtcccccctcatgtgcaggccatgcagggaaacagtgcctcgggaaaccacttctcaggccatgggatgtctttcaatgcacctttcagtggagctcccaatggaaatcagatgtcctgtggtcaaaatccaggcttcccagtcaataaggatgtcacgctaacgagcccattgttggtcaacttattgcagagtgacatatctgcaggccattttggggtaaacaataagcaaaataataccaacgcaaataaaccgaagaagaagaaaccccctcggaagaagaaaaatagtcagcaagatctaaacaccccagatactcgcccagctggtctggaagaggctgatcagccaccgttgcctggagaacaaggaattaacttggataactcaggccctaaactgccagaattttcaaaccggccaccaggttatccttctcaaccagttgaacagaggccacttcagcagatgcctcctcaactcatgcagcatgtggcacccccaccacagccaccacagcagcagccacagccacaactgcctcagcagcagcagccaccacctcccagtcagccacagtctcagcagcagcagcagcagcagcaacaaatgatgatgatgctcatgatgcagcaggatcccaaatcagttaggcttccagtctctcaaaatgtccatcctccaaggggccccctgaaccccgactcccagagaatgcccatgcaacagagtggcagtgtgcctgtcatggtcagtctgcaaggacctgcctccgtgccaccatcacctgataaacaaagaatgccaatgcctgtgaatactcccttgggaagcaattcaaggaaaatggtctatcaggagagcccgcagaatccttccagctcgccactggcggagatggcctcactccctgaagcaagtggcagtgaagcaccatctgtcccaggaggcccaaacaacatgccttcacatgtagtacttccccagaatcagttaatgatgacagggccaaaacctggaccatcgcccctttcagcaactcaaggtgcaactccccagcaaccccctgtaaattccctgcccagctctcacggccaccacttcccaaatgtggctgcgccaacccagacatctaggcccaaaacaccaaacagagccagccccagaccctattatcctcagacacccaacaaccgccctcccagcacagaaccttcagaaatcagtctgtcaccagaaagactcaatgcctccatagcaggactcttccctccacagattaatattcctttacctcctaggccaaatttaaacaggggctttgatcaacaaggcctaaatccaacaactttgaaggccatcgggcaagcaccttcaaatcttaccatgaatccttccaattttgctaccccacaaactcacaaattagattctgtggtagtgaattctggaaagcagtctaattctggagcaacaaaacgggcaagtccaagcaacagtcgcaggtctagtcctgggtccagtaggaaaaccactccaagccctgggaggcaaaattcaaaagcccctaaacttactctggcctctcagacaaatgcagccctattgcagaatgtggagttgccgagaaatgtattggtcagtcccactcctctggccaatccccctgtacctgggagctttcctaacaacagtgggctgaatcctcagaattctactgtgtctgtggctgcagttgggggtgttgttgaggataacaaggagagcttgaatgtgcctcaggacagtgattgccagaattcccagagtaggaaggaacaggtaaacattgaactaaaagcagtccctgcccaagaagttaaaatggttgtccctgaagatcagtccaaaaaggatgggcagccttcggatcctaacaaacttcccagtgtcgaagagaacaaaaatttggtgtctcctgctatgagggaagcaccaacatcgttaagtcaacttcttgacaactctggagctcccaatgtgacaattaaaccccctgggcttacagatctggaagtaacacctccagtagtttctggggaggacctcaaaaaagcatctgtcattcccacactgcaggatctgtcttcttctaaagaaccttctaattccctaaacttacctcacagtaatgagctgtgttcatcccttgtgcatcccgaattgagtgaggtcagttctaacgttgcaccaagcatccctccagtaatgtcaagacctgttagctcttcctccatttccactcccttgcccccaaatcaaataactgtatttgtcacttccaatcccatcacaacttcagctaacacatcagcagctttgccaactcacttgcagtctgcattgatgtcaacagttgtcacaatgcccaatgcgggtagcaaggttatggtttctgagggacagtcagctgctcagtctaatgcccggcctcagttcattacacctgtctttatcaattcatcctcaataattcaggttatgaaaggatcacagccaagcacaattcctgcagccccactgacaaccaactctggcctgatgcctccctctgttgcagttgttggccctttacacatacctcagaacataaaattttcttctgctcctgtaccgcctaatgccctctccagtagtcctgctccaaacatccagacaggtcgacctttggtccttagctcacgagccacccctgttcagcttccttcccctccttgtacgtcttctccagttgtcccttctcatccccctgtgcagcaagtgaaagaattgaatccagatgaggctagccctcaggtgaacacctcagcagatcagaacactcttccctcttcacagtcaaccacaatggtttctccccttttgaccaatagtccagggtcctctggcaaccggcgaagcccagtctcgtctagtaagggcaaaggaaaagtggacaaaattggccaaattttgttgaccaaggcatgtaagaaagttacaggctctcttgagaaaggggaagaacaatatggtgcagatggagagactgaaggccaagggctagacaccacagctccggggctcatgggaacagagcagttatccacagagctggacagtaaaaccccaacgcccccagcacccactctgctaaaaatgacctctagccctgtgggcccgggcactgcctcagcaggacccagcttacctggcggtgctctccccaccagtgtacgctcgatagtaaccactctggtaccctccgagctcatctccgccgtaccgaccacaaaaagcaatcatggtggcatagcatctgagtcacttgcgggtggcctagtggaggagaaggtgggatcccatccagaacttctacccagcatagccccgtcgcagaatttagtctcaaaggaaacttcaaccacagcactgcaggcctctgttgccagaccagagctggaggtaaatgctgccatagtctctggacaaagcagtgagcccaaagagatagttgaaaagtccaaaatcccaggccgaagaaactcccgaactgaagagccaactgtggcctctgaaagtgtggaaaatggacatcgtaaacgatcttctcgacctgcttcagcctccagctctactaaagacataaccagtgcggtgcaatccaagcgaagaaaatccaagtaaacaagcaggactgcgacttgatacttggaaatgtgtgtgacttttacaaagagcaattttgagctgtgacttttttaaatcaatttctgtacagttagtaattttaataatgtggcccttttcctagtccctgcaacctgtttcataaagtgcaatggggaaagcaggactgttgagcccttttggtgttgcgagttgaagttcaaggtttctaaaatgttgtcttgtattgaaaggagctaatgccattataaatgttactagttttcacatttcctaagcagcctagagtacagggtgagcatttttagatctcctaatgatgtattgtgccgtggaagtactgtgtgtgaatagcagtagtgggggcaaaagcaatcttctcatttggaaatgttgtaaataattttattatatagtgttttggatgtatttgttgtagaaatggaccagtgaataaagagaatctaaggatttgtacaatgtgaaataacgtgttaaataaatgtcattgtcatagaacataaagttatgttattggtaagggaaaaaaaaaa

SEQ ID NO: 140 - DNA, 3843 bp, Homo sapiens
ggcgccgtgtccgggtgtggagaggggcgtcgtggaagcgagaagagtggcccgtccctctcctccccctttccctctttcggaaagtggtttctgcggggcccgggagcctcggagtaccgaacctcgatctccggggcggggtccttggtggggactgagcgccccctcccggggacgggcggtctggccgcggagtcccctgcgggagcgtgattggctggaaacggtcccgaacccccaggggagcccgatccctgggggaccctggcttcggactccagtatctgtcgtcgcagggtccctgccctagtggcctatgtcccttgctcggggccatggagacactgcggccagtacggcggcgcctctgtctgaagaaggggaagtgacctccggcctccaggctctggccgtggaggataccggaggcccctctgcctcggccggtaaggccgaggacgagggggaaggaggccgagaggagaccgagcgtgaggggtccgggggcgaggaggcgcagggagaagtccccagcgctgggggagaagagcctgccgaggaggactccgaggactggtgcgtgccctgcagcgacgaggaggtggagctgcctgcggatgggcagccctggatgcccccgccctccgaaatccagcggctctatgaactgctggctgcccacggtactctggagctgcaagccgagatcctgccccgccggcctcccacgccggaggcccagagcgaagaggagagatccgatgaggagccggaggccaaagaagaggaagaggaaaaaccacacatgcccacggaatttgattttgatgatgagccagtgacaccaaaggactccctgattgaccggagacgcaccccaggaagctcagcccggagccagaaacgggaggcccgcctggacaaggtgctgtcggacatgaagagacacaagaagctggaggagcagatccttcgtaccgggagggacctcttcagcctggactcggaggaccccagccccgccagccccccactccgatcctccgggagtagtctcttccctcggcagcggaaatactgattcccactgctcctgcctctagggtgcagtgtccgtacctgctggagcctgggccctccttccccagcccagacattgagaaacttgggaagaagagagaaacctcaagctcccaaacagcacgttgcgggaaagaggaagagagagtgtgagtgtgtgtgtgtgttttttctattgaacacctgtagagtgtgtgtgtgtgttttctattgaacacctatagagagagtgtgtgtgttttctattgaacatctatatagagagagtgtgtgagtgtgtgttttctattgaacacctattcagagacctggactgaattttctgagtctgaaataaaagatgcagagctatcatctcttaaaaggaggggctgtagctgtagctcaacagttaggccccacttgaagggagaggcagaattgtactcacccagattggaaaatgaaagccagatgggtagaggtgccctcagttagcacctgtcccatctcgggccctccaactcctcccagtcccactccagtgcagccagctggctccaaggtagaaacccatgagcactcagggagcagtgtgccttcagctgcagcagaagcagcccggaggataaaatgagaaccagctgcacacgggccctttaactcccaagccccacccctgggcttggcctgccttgccctgccgggaagtgatccccaaggcagggtgagagttccccatctgaggcgtttgttgcagctacctgcacttctagatgtgagtacattgtactagccccccaaaccccaaatcaggggcagatctttgtatcccttgaggctctctttagtcctgtcttgctttgaagggccttgcttctgctggggcagggaaaacatgtctgaatcagagtggggaaggaggatgggtggtggctttgcttttggaggtttcactttccaatagttgggagtcttctgggttttgaagtaaaggcagattaacaccaacaccggtcccccacccccctgcaactctcaggcctctctctgacttcagggtcccacctgggaaatcaggtggggaaccttacagggtcattcagaccccatcttagccctagatcggtgcttgctctactcacctgcactgtcctggggacctgggctctggcctgtcaccttgagctccaagaatgtgacctgtacccattcaggccccttaactctgacagatgagggtttcttactcctccatgcagggctgggccagctgttggtctcagtcgatcattcaggaagtcattagcagagtgatttccagaaggcgtagaatttagtgaccaaggttctttcctttttgggaggagaaagtgaaaactaggatgctcagctggacccaccagcctgagattctggggattttagagctgtcccttggggagccaagcacttgggggtggaggtgatagcgaggctgatggcccctgtgttctcagctctctgcctgggtagcccctgggtgatgggggagaggccagctgtcacgtggggtatcaggtggctctgccagaaactcccttggcacacagagcactgggtcggccctcgggtgtggctgtttgggcaggacagccctctgtatgtagccttgagcaggtaggggggccaccttgagtgggtggcccagagacagcctcagggctccaaggtaacggggtgctcaggttatcttgggtgctgccctcccaggttctgggggagcagaggctgggcgctggcccaacttacaggaaacactcacctttgaactgccattagcaccatctgggcagtacacagccccacccaggtcctctagttcttgttctcggcttagaatctttgtgtttctgcctgagaagccactgcctcctagtttgtggtctctacagttatagccaggttggacttccggctccgtcctttgataactgtgtgctcttgggcaaatttcttaacttgcaggttcttgtgaggataacatgagttaattgagggcacttaacactacctggcacagattaagctcatctgaagtgggagctgttacttaggggcgtttgcctagaacacagggtccagaggctctctcccggaaacttagacccagtgagtcagaagtgaggcctgcaaaaagcagcaggagtggggttaagaattccagcctagggctggatgcggtggctcaggcctgtaatcccagtactttgggaggcccgaatgggaggatggcttgaggccaggagttccagaccagcctgagcaacatagcgagaccctgtctctgtttgtgtgtgtgtggttggggttttgttttttttttttttttaaagaattatagctcagtcctatgattaggcaagttgagaaaatattgatgaagatcaggggtgctgaagcctggttcctggggtcgcttctgatctaggcggttcttgcctctggtgactggtgttaattggcaggagtgggaggagggaggacaagtggaagtctaggctggctgagctgttctgtctcgaaaagttcctaaaactgtgctgctttaaaaaaaaaaaaagtaatttatgagacacattctcaatttccattaatcatctcctaaagggggtaaaccaggaagccgctgggtgaaaacaggctgttggcaattcctgagtcatgtgacccattctctaaagactagaatatttaacttaaatcagtgagaaactctgtgaaaaaaaaaaaaaaaaaaaa

SEQ ID NO: 141 - DNA, 3723 bp, Homo sapiens
cggggccgggcgccgccgcggagcctcccgggccgccgcgatcatgtcggaccaggcgcccaaagttcctgaggagatgttcagggaggtcaagtattacgcggtgggcgacatcgacccgcaggttattcagcttctcaaggctggaaaagcgaaggaagtttcctacaatgcactagcctcacacataatctcagaggatggggacaatccagaggtgggagaagctcgggaagtctttgacttacctgttgtaaagccttcttgggtgattctgtccgttcagtgtggaactcttctgccagtaaatggtttttctccagaatcatgtcagattttttttggaatcactgcctgcctttctcaggtgtcatctgaagacagaagtgccctgtgggctttggttacgttctatgggggagattgccagctaaccctcaataagaaatgcacgcatttgattgttccagagccaaagggggagaaatacgaatgtgctttaaagcgagcaagtattaaaattgtgactcctgactgggttctggattgcgtatcagagaaaaccaaaaaggacgaagcattttatcatcctcgtctgattatttatgaagaggaagaagaggaagaggaagaggaggaggaagtagaaaatgaggaacaagattctcagaatgagggtagtacagatgagaagtcaagccctgccagctctcaagaagggtctccttcaggtgaccagcagttttcacctaaatccaacactgaaaaatctaaaggggaattaatgtttgatgattcttcagattcatcaccggaaaaacaggagagaaatttaaactggaccccggccgaagtcccacagttagctgcagcaaaacgcaggctgcctcagggaaaggagcctgggttgattaacttgtgtgccaatgtcccacccgtcccaggtaacattttgccccctgaggtccggggtaatttaatggctgctggacaaaacctccaaagttctgaaagatcagaaatgatagctacctggagtccagctgtacggacactgaggaatattactaataatgctgacattcagcagatgaaccggccatcaaatgtagcacatatcttacagactctttcagcacctacgaaaaatttagaacagcaggtgaatcacagccagcagggacatacaaatgccaatgcagtgctgtttagccaagtgaaagtgactccagagacacacatgctacagcagcagcagcaggcccagcagcagcagcagcagcacccggttttacaccttcagccccagcagataatgcagctccagcagcagcagcagcagcagatctctcagcaaccttacccccagcagccgccgcatccattttcacagcaacagcagcagcagcagcaagcccatccgcatcagttttcacagcaacagctacagtttccacagcaacagttgcatcctccacagcagctgcatcgccctcagcagcagctccagccctttcagcagcagcatgccctgcagcagcagttccatcagctgcagcagcaccagctccagcagcagcagcttgcccagctccagcagcagcacagcctgctccagcagcagcagcaacagcagattcagcagcagcagctccagcgcatgcaccagcagcagcagcagcagcagatgcaaagtcagacagcgccacacttgagtcagacgtcacaggcgctgcagcatcaggttccacctcagcagcccccgcagcagcagcagcaacagcagccaccaccatcgcctcagcagcatcagctttttggacatgatccagcagtggagattccagaagaaggcttcttattgggatgtgtgtttgcaattgcggattatccagagcagatgtctgataagcaactgctggccacctggaaaaggataatccaggcacatggcggcactgttgaccccaccttcacgagtcgatgcacgcaccttctctgtgagagtcaagtcagcagcgcgtatgcacaggcaataagagaaagaaagagatgtgttactgcacactggttaaacacagtcttaaagaagaagaaaatggtaccgccgcaccgagcccttcacttcccagtggccttcccaccaggaggaaagccatgttcacagcatattatttctgtgactggatttgttgatagtgacagagatgacctaaaattaatggcttatttggcaggtgccaaatatacgggttatctatgccgcagcaacacagtcctcatctgtaaagaaccaactggtttaaagtatgaaaaagccaaagagtggaggataccctgtgtcaacgcccagtggcttggcgacattcttctgggaaactttgaggcactgaggcagattcagtatagtcgctacacggcattcagtctgcaggatccatttgcccctacccagcatttagttttaaatcttttagatgcttggagagttcccttaaaagtgtctgcagagttgttgatgagtataagactacctcccaaactgaaacagaatgaagtagctaatgtccagccttcttccaaaagagccagaattgaagacgtaccacctcccactaaaaagctaactccagaattgaccccttttgtgcttttcactggattcgagcctgtccaggttcaacagtatattaagaagctctacattcttggtggagaggttgcggagtctgcacagaagtgcacacacctcattgccagcaaagtgactcgcaccgtgaagttcctgacggcgatttctgtcgtgaagcacatagtgacgccagagtggctggaagaatgcttcaggtgtcagaagttcattgatgagcagaactacattctccgagatgctgaggcagaagtacttttctctttcagcttggaagaatccttaaaacgggcacacgtttctccactctttaaggcaaaatatttttacatcacacctggaatctgcccaagtctttccactatgaaggcaatcgtagagtgtgcaggaggaaaggtgttatccaagcagccatctttccggaagctcatggagcacaagcagaactcgagtttgtcggaaataattttaatatcctgtgaaaatgaccttcatttatgccgagaatattttgccagaggcatagatgttcacaatgcagagttcgttctgactggagtgctcactcaaacgctggactatgaatcatataagtttaactgatggcgtctaggctgccgtgcatgtcgactcctgcggtgcggggctggctgtctggctggcgaggagctgctgcgcttccttcacatgctcttgttttccagctgctttcctgggggatcagactgtgaagcaggaagacagatataataaatatactgcatctttttaagatgtgcaattttattctgaggaaacataaattatgttttgtattatatgactttaagagcccacattaggttttatgattcatttgccaggtttttaaatgttttcacaaaactgttacgggacttcaactagaaataaaatggtgtaaataaagaccttgctatctctaaattatggatgttaaagatttgaaatgttttgtactttgattatttttatttcttatactctgttttcttttatattgatatcttgcccacattttaaataaatgtacttttgaacttaaaaaaaaaaaa

SEQ ID NO: 142 - DNA, 11784 bp, Homo sapiens
aggagtggaaggttgaggggggcgctaggcgcccttcgctccctccctctggaggagctgccgccgccaccgccgccactctgctgctgccgccgccgccgccgccgctcccgccgccattttgggttcgctttgcggaggggagacgatcccagtctcggttgcgggacccgcctcccctcagtttgccccctttagccttccacctttcccttctcctctctcgcatttccgccagtcagcttacccgctggccgcctcctgacaagcgggagggatccgccgtggacccagggaagcggaggagcctggcggccaccccctcttccccacttccctgcactctcatcgctctcggcctcggcctcggcctccgacacgagaaagatgctggtttcgagttttggagatccttgttttttatggaacacagttctgtaaaattttcataagattccttggcaataacatacgcttgtgatggaccctagaaatactgctatgttaggattgggttctgattccgaaggtttttcaagaaagagtccttctgccatcagtactggcacattggtcagtaagagagaagtagagctagaaaaaaacacaaaggaggaagaggaccttcgcaaacggaatcgagaaagaaacatcgaagctgggaaagatgatggtttgactgatgcacagcaacagttttcagtgaaagaaacaaacttttcagagggaaatttaaaattgaaaattggcctccaggctaagagaactaaaaaacctccaaagaacttggagaactatgtatgtcgacctgccataaaaacaactattaagcacccaaggaaagcacttaaaagtggaaagatgacggatgaaaagaatgaacactgtccttcaaaacgagacccttcaaagttgtacaagaaagcagatgatgttgcagccattgaatgccagtctgaagaagtcatccgtcttcattcacagggagaaaacaatcctttgtctaagaagctgtctccagtacactcagaaatggcagattatattaatgcaacgccatctactcttcttggtagccgggatcctgatttaaaggacagagcattacttaatggaggaactagtgtaacagaaaagttggcacagctgattgctacctgtcctccttccaagtcttccaagacaaaaccgaagaagttaggaactggcactacagcaggattggttagcaaggatttgatcaggaaagcaggtgttggctctgtagctggaataatacataaggacttaataaaaaagccaaccatcagcacagcagttggattggtaactaaagatcctgggaaaaagccagtgtttaatgcagcagtaggattggtcaataaggactctgtgaaaaaactgggaactggcactacagcggtattcattaataaaaacttaggcaaaaagccaggaactatcactacagtaggactgctaagcaaagattcaggaaagaagctaggaattggtattgttccaggtttagtgcataaagagtctggcaagaagttaggacttggcactgtggttggactggttaataaagatttgggaaagaaattgggttctactgttggcctagtggccaaggactgtgcaaagaagattgtagcaagttcagcaatgggattggttaataaggacattggaaagaaactaatgagttgtcctttggcaggtctgatcagtaaagatgccataaaccttaaagccgaagcactgctccccactcaggaaccgcttaaggcttcttgtagtacaaacatcaataatcaggaaagtcaggaactttctgaatccctgaaagatagtgccaccagcaaaacttttgaaaagaatgttgtacggcagaataaagaaagcatattggaaaagttctcagtacgaaaagaaatcattaatttggagaaagaaatgtttaatgaaggaacatgcattcagcaagacagtttctcatccagtgaaaagggatcttatgaaacctcaaagcatgaaaagcagcctcctgtatattgcacttctccggactttaaaatgggaggtgcttctgatgtatctaccgctaaatccccattcagtgcagtaggagaaagcaatctcccttccccatcacctactgtatctgttaatcctttaaccagaagtccccctgaaacttcttcacagttggctcctaatccattacttttaagttctactacagaactaatcgaagaaatttctgaatctgttggaaagaaccagtttacttctgaaagtacccacttgaacgttggtcataggtcagttggtcatagtataagtattgaatgtaaagggattgataaagaggtaaatgattcaaaaactacccatatagatattccaagaataagctcttcccttggaaaaaagccaagtttgacttctgaatccagcattcatactattactccttcagttgttaacttcactagtttatttagtaataagccttttttaaaactgggtgcagtatctgcatcagacaaacactgccaagttgctgaaagcctaagtactagtttgcagtccaaaccattaaaaaaaagaaaaggaagaaaacctcggtggactaaagtggtggcaagaagcacatgccggtctccaaaagggctagaattagaaagatcagagctttttaaaaacgtttcatgtagctcactatcaaatagtaattctgagccagccaagtttatgaaaaacattggacccccttcatttgtagatcatgacttccttaaacgccgattgccaaagttgagcaaatccacagctccatctcttgctctcttagctgatagtgaaaaaccatctcataagtcttttgctactcacaaactatcctccagtatgtgtgtctctagtgaccttttgtctgatatttataagcccaaaagaggaaggcctaaatctaaggagatgcctcaactggaagggccacctaaaaggactttaaaaatccctgcttctaaagtgttttctttacagtctaaggaagaacaagaacccccaattttacagccagaaattgaaatcccttccttcaaacaaggtctgtctgtgtctccttttccaaaaaagagaggcaggcctaagaggcaaatgaggtcaccagtcaagatgaagccacctgtactgtcagtggctccatttgttgccactgaaagtccaagcaagctagaatctgaaagtgacaaccatagaagtagcagtgatttctttgagagcgaggatcaacttcaggatccagatgacctagatgacagtcataggccaagtgtctgtagtatgagtgaccttgagatggaaccagataaaaaaattaccaagagaaacaatggacaattaatgaaaacaattatccgcaaaataaataaaatgaagactttaaagagaaagaaactgttgaatcagattctttcaagttctgtagaatcaagtaataaagggaaagtgcaatccaaactccataatacggtatcaagtcttgctgccacatttggctctaaattgggccaacagataaatgtcagcaagaaaggaaccatttatataggaaagagaagaggtcgcaaaccaaaaactgtcttaaatggtattctttctggtagtcctactagccttgctgttcttgagcaaacagctcaacaggcagctgggtcagcattaggacagattcttcccccattactgccttcatctgctagtagttctgagattcttccatcacctatttgctctcagtcttctgggactagtggaggtcagagccctgtaagtagtgatgcaggttttgttgaacccagttcagtgccatatttgcatttacactccagacagggcagtatgattcagactcttgcaatgaagaaggcctcaaaggggaggaggcggttatctcctcctactttgttgccaaattctccttcgcacttgagtgaactcacatctctaaaagaagctactccttccccaatcagtgagtctcatagtgatgagaccattcccagtgatagtggaattggaacagataataacagcacatcagacagggcagagaaattttgtgggcaaaaaaagaggaggcattcttttgagcatgtttctctgattccccctgaaacctctacagtgctaagcagtcttaaagaaaaacataaacacaaatgtaagcgcaggaatcatgattacctcagctatgacaagatgaaaaggcagaaacgaaaacggaaaaagaaatatccccagcttcgaaatagacaggatccagactttattgcagagctggaggaactaataagtcgcctaagtgaaattcggatcactcatcgaagtcatcattttatcccccgagatcttctgccaactatctttcgaatcaactttaatagtttctatacacatccttctttccccttagaccctttgcactacattcgaaaacctgacttaaaaaagaaaagagggagaccccctaagatgagggaggcaatggctgaaatgccttttatgcacagccttagttttcctctttctagtactggattctatccatcttatggtatgccttactctccttcaccccttacagctgctcccataggattaggttactatggaaggtatcctcccactctttatccacctcctccatctccttctttcaccacgccacttccacctccttcctatatgcatgctggtcatttacttctcaatcctgccaaataccataagaaaaagcataagctacttcgacaggaggcctttcttacaaccagcaggactcccctcctttccatgagtacctaccccagtgttcctcctgagatggcctatggttggatggttgagcacaaacacaggcaccgtcacaaacacagagaacaccgttcttctgaacaaccccaggtttctatggacactggctcttcccgatctgtcctggaatctttgaagcgctatagatttggaaaggatgctgttggagagcgatataagcataaggaaaagcaccgttgtcacatgtcctgccctcatctctctccttcaaaaagcttaataaacagagaggaacagtgggtccaccgagagccttcagaatctagtccattggccttgggattgcagacacctttacagattgactgttcagaaagttctccaagcttatcccttggaggattcactcccaactctgagccagccagcagtgatgaacatacaaaccttttcacaagtgcaataggcagctgcagagtttcaaaccctaactccagtggccggaagaaattaactgacagccctggactcttttctgcacaggacacttcactaaatcggcttcacagaaaggagtcactgccttctaacgaaagggcagtacagactttggcaggctcccagccaacctctgataaaccctcccagcggccatcagagagcacaaattgtagccctacccggaaaaggtcttcatctgagagtacttcttcaacagtaaacggagttccctctcgaagtccaagattagttgcttctggggatgactctgtggatagtctgctgcagcggatggtacaaaatgaggaccaagagcccatggagaaaagtattgatgctgtgattgcaactgcctctgcaccaccttcttccagtccaggccgtagccacagcaaggaccgaaccctgggaaaaccagacagccttttagtgcctgcagtcacaagtgactcttgcaataatagcatctcactcctatctgaaaagttgacaagcagctgttccccccatcatatcaagagaagtgtagtggaagctatgcaacgccaagctcggaaaatgtgcaattacgacaaaatcttggccacaaagaaaaacctagaccatgtcaataaaatcttaaaagccaaaaaacttcaaaggcaggccaggacagggaataactttgtgaaacgtaggccaggtcgacctcggaaatgtccccttcaggctgtcgtatcaatgcaagcattccaggctgctcagtttgtcaacccagaattgaacagagacgaggaaggagcagcactgcacctcagtcctgacacagttacagatgtaattgaggctgttgttcagagtgtaaatctgaacccagaacataaaaaggggttgaagagaaaaggttggctattggaagaacagaccagaaaaaagcagaagccattaccagaggaagaagagcaagagaataataaaagctttaatgaagcaccagttgagattcccagtccttctgaaaccccagctaaaccttctgaacctgaaagtaccttgcagcctgtgctttctctcatcccaagggaaaagaagcccccacgtcccccaaagaagaagtatcagaaagcagggctgtattctgacgtttacaaaactacagacccaaagagtcgattgatccaattaaagaaagagaagctggagtatactccaggagagcatgaatatggattatttccagcgcccattcatgttggaaagtatctaagacaaaagagaattgacttccagcttccttatgatatcctttggcagtggaaacacaatcagctatacaaaaagccagatgtcccactatataagaaaattcgttcaaatgtctacgttgatgtcaaacccctttctggttacgaagctaccacctgtaactgtaagaagccagatgatgacaccaggaagggctgtgttgatgactgcctcaatagaatgatctttgctgagtgttcccccaacacttgcccatgtggcgagcaatgctgtaaccagaggatacagaggcatgaatgggtgcaatgtctagaacgatttcgagctgaggaaaaaggttggggaatcagaaccaaagagcccctaaaagctgggcagttcatcattgaatacctaggggaggtcgtcagtgaacaggagttcaggaacaggatgattgagcagtatcataatcacagtgaccactactgcctgaacctggatagtgggatggtgattgacagttaccgcatgggaaatgaggcccgattcatcaaccatagctgtgacccaaattgtgaaatgcagaaatggtctgttaatggagtataccggattggactctatgctcttaaagacatgccagctgggactgaactcacttatgattataactttcattccttcaatgtggaaaaacagcaactttgtaagtgtggctttgagaaatgtcgaggaatcatcggaggcaagagtcagcgtgtgaatggactcaccagcagcaaaaacagccagcccatggccacacacaaaaaatctggacggtcaaaagagaagagaaagtctaagcacaagctgaagaaaaggagaggccatctctctgaggaacccagtgaaaatatcaacaccccaactagattgaccccccaattacagatgaagccaatgtccaatcgtgaaaggaactttgtgttaaagcatcatgtattcttggtccgaaactgggagaagattcgtcaaaaacaggaggaagtaaagcacaccagtgataatattcactcagcatcattatatacccgttggaatgggatctgccgagatgatgggaatatcaagtctgatgtcttcatgacccagttctctgccctgcagacagctcgatctgttcgaacaagacggttggcagctgcagaggaaaatattgaagtggctcgggcagcccgcctagcccagatcttcaaagaaatttgtgatggtatcatctcttataaagattcttcccggcaagcactggcagctccacttttgaaccttcccccaaagaaaaagaatgctgattattatgagaagatctctgatcccctagatcttatcaccatagagaagcagatcctcactggttactataagacagtggaagcttttgatgctgacatgctcaaagtctttcggaatgctgagaagtactatgggcgtaaatccccagttgggagagatgtttgtcgtctacgaaaggcctattacaatgcccggcatgaggcatcagcccagattgatgagattgtgggagagacagcaagtgaggcagacagcagtgagacctcagtctctgaaaaggagaatgggcatgagaaggacgacgatgttattcgctgtatctgtggcctctacaaggatgaaggtctcatgatccagtgtgacaagtgcatggtatggcagcactgtgattgtatgggagtgaactcagatgtggagcactacctttgtgagcagtgtgacccaaggcctgtggacagggaggttcccatgatccctcggccccactatgcccaacctggctgtgtctacttcatctgtttgctccgagatgacttgctgcttcgtcagggtgactgtgtgtatctgatgagggatagtcggcgcacccctgatggccacccggtccgtcagtcctatcgactgttatctcacattaaccgagataaacttgacatctttcgcattgagaagctttggaagaatgaaaaagaggaacggtttgcctttggtcaccattatttccgtccccacgaaacacaccactctccatcccgtcggttctatcataatgaactatttcgggtgccactctatgagatcattcccttggaggctgtagtggggacctgctgtgtgttggacctttatacgtattgtaaagggagacccaaaggagtaaaggagcaagatgtgtacatctgtgattatcggcttgacaagtcagcacacctgttttacaagatccaccggaaccgctatcctgtctgcaccaaaccctatgcttttgatcacttccccaagaagctcactcccaaaaaagatttctcgcctcattacgtcccagacaactacaagaggaatggaggacgatcatcctggaagtctgagcgctcaaagccacccctaaaagacttgggccaggaggatgatgctctacccttgattgaagaggttctagccagtcaagagcaagcagccaatgagatacccagcctggaggagccagaacgggaaggggccactgctaacgtcagtgagggtgaaaaaaaaacagaggaaagtagtcaagaaccccagtcaacctgtacccctgaggaacgacggcataaccaacgggaacgactcaaccagatcttgctcaatctccttgaaaaaatccctggaaaaaatgccattgatgtgacctacttgctggaggaaggatcaggcaggaaactgcgaaggcgtactttgtttatcccagaaaacagctttcgaaagtgaccctcaaagaatgagaacctcaagcatctgggatccagtggagctaatcagtcctgcctcctgctctctgggtatagacaggggtgggaagggtccatctgggcaaggggaatggggccatgttgttgacattaggtacttaataagccttggagctagtggagagggagaggaaagggttctgtccaagacagttcaggttaattaattttcttctccattgcttcaccttaagggttaataatgtagagaggagggaggaccacattgatgaccagaacctactggtactttatagcatttgccccaccccacagcttaggtttttctgtcatcctcagatcccacaggcattgcgaagaagctgcttcctatacccaggtataactcaaaatccaaagggatagggccaggatccctattcctaccccatctattctctgttggctccaagagctaccccagagaccttaaacagaaacagtagctgaggcttcttcctagatacctgactagggaagtttgtctctcctttcttgcccaaccaggtcaaagtaaaatgtgagttgacagctcaaagcacttgtaactgctgccccctccctacctctactccccaaaatggaatcatgggatagggaaggcccccatggggtcagaagggcacggtagttcttgcaattatttttgttttacccttcataacctgtcaaacatatttttttctaatgagaaagccaggcccccgccagcacacatgctgtttttaatgcgctgtagttcttgtgtgtctgctgtgctgtgcaaatggagattcagttcaaaataaaatcatttaaaaacctacataaaaagaactctaaacccacccctgcaacaaaagtcactacataaactgttcagcagtattcacctatcagagtatttgttgtgagtatagattatcaattgaaaacactactcttgttttcttaattgtacagttttcaatgtccctttcttaaagagacagtatatttctcttcacccctagcccatcttccctcaccctcctgaatgacatcaggaggtatatccagggtgtctccttccttcctactctcttgaccagaagttaacagactatactgtctctttaaaaataaaatttaaaaagctttgttgtcttttcagacatacatatgcatatatgttttagatgttcttataagagaaaagatggtttttaaatgtgccaagttgtgtgtgtgtgtgtatatatatgtgtgtatgtgtgtgtatatatatatgtgtgtgtgtatatatatacacacacacacacacacctgctgtgtgattggtaagcaatacaatagtaaacatgtccccattacttttttctaatattggaccaatgctgtcctaattgtacatttccccttatggtgacgatgctctgactcgtttaggtagacacattgaccaccttccattccattaaatattttttcctttttcccctttctgtgtcattcttgaggaaaaaacaaaagagagaggggatgccaatgatccccttgagcagagaaaaagcaaaataaatattttattaaagaaaaaagagaattaagaaaatagtttggagtattttcttactgtagagaagcactgtacattactaagagacctgggtataagatactcacatgtggagctggaaaaatcgcatgtccaagcccgtttgagtggtttcttttgtttttcattgcagggagtgggtgggagggaggtgggactaggggcactttgggggtctccttttagtcaaaagcgagaaaatgacaagaaagagattaaaattcaatgtttcctttatagtgttaaacactaaaattttaaaaaagatgaaaaagaaaaaaaaactttgtaaaatgcgagaacagaagcaaaagacactacgctctgtcattttatctttcttttgttgaaagactaaaaaaaaactgaaatgttttttagacaatcaaatgttaggtaagtgcaaaaacttgttttttcttactggtgtagaaattaatgcctttttttatttttcagttattttataataacgaaataaaaagaaccccccagctgccaggcgggttttggtgtttgaaatgcggggcaaagcactacatcactgcaaatagatacagagttagtctgcatgtctgtaggctgtgtgattgcggaaaatataaatgctgctaatatatttcctttttacaaaagcatatctaaatagatgattgttttgatgttaatctttgtaaattatgtattaccaattttaacattggatgtaattgcatacaaagcttgcatctcaatccttgaaagtctagtattaaatggaaaaaacttttcctaactgtggaaaaaaaaaaa

SEQ ID NO: 143 - DNA, 5892 bp, Homo sapiens
gcgtcttccggcgcccgcggaggaggcgagggtgggacgctgggcggagcccgagtttaggaagaggaggggacggctgtcatcaatgaagtcatattcataatctagtcctctctccctctgtttctgtactctgggtgactcagagagggaagagattcagccagcacactcctcgcgagcaagcattactctactgactggcagagacaggagaggtagatgtccacgcccacagaccctggtgcgatgccccacccagggccttcgccggggcctgggccttcccctgggccaattcttgggcctagtccaggaccaggaccatccccaggttccgtccacagcatgatggggccaagtcctggacctccaagtgtctcccatcctatgccgacgatggggtccacagacttcccacaggaaggcatgcatcaaatgcataagcccatcgatggtatacatgacaaggggattgtagaagacatccattgtggatccatgaagggcactggtatgcgaccacctcacccaggcatgggccctccccagagtccaatggatcaacacagccaaggttatatgtcaccacacccatctccattaggagccccagagcacgtctccagccctatgtctggaggaggcccaactccacctcagatgccaccaagccagccgggggccctcatcccaggtgatccgcaggccatgagccagcccaacagaggtccctcacctttcagtcctgtccagctgcatcagcttcgagctcagattttagcttataaaatgctggcccgaggccagcccctccccgaaacgctgcagcttgcagtccaggggaaaaggacgttgcctggcttgcagcaacaacagcagcagcaacagcagcagcagcagcagcagcagcagcagcagcagcagcaacagcagccgcagcagcagccgccgcaaccacagacgcagcaacaacagcagccggcccttgttaactacaacagaccatctggcccggggccggagctgagcggcccgagcaccccgcagaagctgccggtgcccgcgcccggcggccggccctcgcccgcgccccccgcagccgcgcagccgcccgcggccgcagtgcccgggccctcagtgccgcagccggccccggggcagccctcgcccgtcctccagctgcagcagaagcagagccgcatcagccccatccagaaaccgcaaggcctggaccccgtggaaattctgcaagagcgggaatacagacttcaggcccgcatagctcataggatacaagaactggaaaatctgcctggctctttgccaccagatttaagaaccaaagcaaccgtggaactaaaagcacttcggttactcaatttccagcgtcagctgagacaggaggtggtggcctgcatgcgcagggacacgaccctggagacggctctcaactccaaagcatacaaacggagcaagcgccagactctgagagaagctcgcatgaccgagaagctggagaagcagcagaagattgagcaggagaggaaacgccgtcagaaacaccaggaatacctgaacagtattttgcaacatgcaaaagattttaaggaatatcatcggtctgtggccggaaagatccagaagctctccaaagcagtggcaacttggcatgccaacactgaaagagagcagaagaaggagacagagcggattgaaaaggagagaatgcggcgactgatggctgaagatgaggagggttatagaaaactgattgatcaaaagaaagacaggcgtttagcttaccttttgcagcagaccgatgagtatgtagccaatctgaccaatctggtttgggagcacaagcaagcccaggcagccaaagagaagaagaagaggaggaggaggaagaagaaggctgaggagaatgcagagggtggggagtctgccctgggaccggatggagagcccatagatgagagcagccagatgagtgacctccctgtcaaagtgactcacacagaaaccggcaaggttctgttcggaccagaagcacccaaagcaagtcagctggacgcctggctggaaatgaatcctggttatgaagttgcccctagatctgacagtgaagagagtgattctgattatgaggaagaggatgaggaagaagagtccagtaggcaggaaaccgaagagaaaatactcctggatccaaatagcgaagaagtttctgagaaggatgctaagcagatcattgagacagctaagcaagacgtggatgatgaatacagcatgcagtacagtgccaggggctcccagtcctactacaccgtggctcatgccatctcggagagggtggagaaacagtctgccctcctaattaatgggaccctaaagcattaccagctccagggcctggaatggatggtttccctgtataataacaacttgaacggaatcttagccgatgaaatggggcttggaaagaccatacagaccattgcactcatcacttatctgatggagcacaaaagactcaatggcccctatctcatcattgttcccctttcgactctatctaactggacatatgaatttgacaaatgggctccttctgtggtgaagatttcttacaagggtactcctgccatgcgtcgctcccttgtcccccagctacggagtggcaaattcaatgtcctcttgactacttatgagtatattataaaagacaagcacattcttgcaaagattcggtggaaatacatgatagtggacgaaggccaccgaatgaagaatcaccactgcaagctgactcaggtcttgaacactcactatgtggcccccagaaggatcctcttgactgggaccccgctgcagaataagctccctgaactctgggccctcctcaacttcctcctcccaacaatttttaagagctgcagcacatttgaacaatggttcaatgctccatttgccatgactggtgaaagggtggacttaaatgaagaagaaactatattgatcatcaggcgtctacataaggtgttaagaccatttttactaaggagactgaagaaagaagttgaatcccagcttcccgaaaaagtggaatatgtgatcaagtgtgacatgtcagctctgcagaagattctgtatcgccatatgcaagccaaggggatccttctcacagatggttctgagaaagataagaaggggaaaggaggtgctaagacacttatgaacactattatgcagttgagaaaaatctgcaaccacccatatatgtttcagcacattgaggaatcctttgctgaacacctaggctattcaaatggggtcatcaatggggctgaactgtatcgggcctcagggaagtttgagctgcttgatcgtattctgccaaaattgagagcgactaatcaccgagtgctgcttttctgccagatgacatctctcatgaccatcatggaggattattttgcttttcggaacttcctttacctacgccttgatggcaccaccaagtctgaagatcgtgctgctttgctgaagaaattcaatgaacctggatcccagtatttcattttcttgctgagcacaagagctggtggcctgggcttaaatcttcaggcagctgatacagtggtcatctttgacagcgactggaatcctcatcaggatctgcaggcccaagaccgagctcaccgcatcgggcagcagaacgaggtccgggtactgaggctctgtaccgtgaacagcgtggaggaaaagatcctcgcggccgcaaaatacaagctgaacgtggatcagaaagtgatccaggcgggcatgtttgaccaaaagtcttcaagccacgagcggagggcattcctgcaggccatcttggagcatgaggaggaaaatgaggaagaagatgaagtaccggacgatgagactctgaaccaaatgattgctcgacgagaagaagaatttgacctttttatgcggatggacatggaccggcggagggaagatgcccggaacccgaaacggaagccccgtttaatggaggaggatgagctgccctcctggatcattaaggatgacgctgaagtagaaaggctcacctgtgaagaagaggaggagaaaatatttgggagggggtcccgccagcgccgtgacgtggactacagtgacgccctcacggagaagcagtggctaagggccatcgaagacggcaatttggaggaaatggaagaggaagtacggcttaagaagcgaaaaagacgaagaaatgtggataaagatcctgcaaaagaagatgtggaaaaagctaagaagagaagaggccgccctcccgctgagaaactgtcaccaaatccccccaaactgacaaagcagatgaacgctatcatcgatactgtgataaactacaaagataggtgtaacgtggagaaggtgcccagtaattctcagttggaaatagaaggaaacagttcagggcgacagctcagtgaagtcttcattcagttaccttcaaggaaagaattaccagaatactatgaattaattaggaagccagtggatttcaaaaaaataaaggaaaggattcgtaatcataagtaccggagcctaggcgacctggagaaggatgtcatgcttctctgtcacaacgctcagacgttcaacctggagggatcccagatctatgaagactccatcgtcttacagtcagtgtttaagagtgcccggcagaaaattgccaaagaggaagagagtgaggatgaaagcaatgaagaggaggaagaggaagatgaagaagagtcagagtccgaggcaaaatcagtcaaggtgaaaattaagctcaataaaaaagatgacaaaggccgggacaaagggaaaggcaagaaaaggccaaatcgaggaaaagccaaacctgtagtgagcgattttgacagcgatgaggagcaggatgaacgtgaacagtcagaaggaagtgggacggatgatgagtgatcagtatggacctttttccttggtagaactgaattccttcctcccctgtctcatttctacccagtgagttcatttgtcatataggcactgggttgtttctatatcatcatcgtctataaactagctttaggatagtgccagacaaacatatgatatcatggtgtaaaaaacacacacatacacaaatatttgtaacatattgtgaccaaatgggcctcaaagattcagattgaaacaaacaaaaagcttttgatggaaaatatgtgggtggatagtatatttctatgggtgggtctaatttggtaacggtttgattgtgcctggttttatcacctgttcagatgagaagatttttgtcttttgtagcactgataaccaggagaagccattaaaagccactggttattttatttttcatcaggcaattttcgaggtttttatttgttcggtattgtttttttacactgtggtacatataagcaactttaataggtgataaatgtacagtagttagatttcacctgcatatacatttttccattttatgctctatgatctgaacaaaagctttttgaattgtataagatttatgtctactgtaaacattgcttaatttttttgctcttgatttaaaaaaaagttttgttgaaagcgctattgaatattgcaatctatatagtgtattggatggcttcttttgtcaccctgatctcctatgttaccaatgtgtatcgtctccttctccctaaagtgtacttaatctttgctttctttgcacaatgtctttggttgcaagtcataagcctgaggcaaataaaattccagtaatttcgaagaatgtggtgttggtgctttcctaataaagaaataatttagcttgacaaaaaaaaaaaaaaa

SEQ ID NO: 144 - DNA, 5779 bp, Homo sapiens
ggagaggccgccgcggtgctgagggggaggggagccggcgagcgcgcgcgcagcgggggcgcgggtggcgcgcgtgtgtgtgaagggggggcggtggccgaggcgggcgggcgcgcgcgcgaggcttcccctcgtttggcggcggcggcggcttctttgtttcgtgaagagaagcgagacgcccattctgcccccggccccgcgcggaggggcgggggaggcgccgggaagtcgacggcgccggcggctcctgcgtctcgcccttttgcccaggctagagtgcagtggtgcggtcatggttcactgcagcctcaacctcctggactcagcaggaggccactgtctgcagctcccgtgaagatgtccactccagacccacccctgggcggaactcctcggccaggtccttccccgggccctggcccttcccctggagccatgctgggccctagcccgggtccctcgccgggctccgcccacagcatgatggggcccagcccagggccgccctcagcaggacaccccatccccacccaggggcctggagggtaccctcaggacaacatgcaccagatgcacaagcccatggagtccatgcatgagaagggcatgtcggacgacccgcgctacaaccagatgaaaggaatggggatgcggtcagggggccatgctgggatggggcccccgcccagccccatggaccagcactcccaaggttacccctcgcccctgggtggctctgagcatgcctctagtccagttccagccagtggcccgtcttcggggccccagatgtcttccgggccaggaggtgccccgctggatggtgctgacccccaggccttggggcagcagaaccggggcccaaccccatttaaccagaaccagctgcaccagctcagagctcagatcatggcctacaagatgctggccagggggcagcccctccccgaccacctgcagatggcggtgcagggcaagcggccgatgcccgggatgcagcagcagatgccaacgctacctccaccctcggtgtccgcaacaggacccggccctggccctggccctggccccggcccgggtcccggcccggcacctccaaattacagcaggcctcatggtatgggagggcccaacatgcctcccccaggaccctcgggcgtgccccccgggatgccaggccagcctcctggagggcctcccaagccctggcctgaaggacccatggcgaatgctgctgcccccacgagcacccctcagaagctgattcccccgcagccaacgggccgcccttcccccgcgccccctgccgtcccacccgccgcctcgcccgtgatgccaccgcagacccagtcccccgggcagccggcccagcccgcgcccatggtgccactgcaccagaagcagagccgcatcacccccatccagaagccgcggggcctcgaccctgtggagatcctgcaggagcgcgagtacaggctgcaggctcgcatcgcacaccgaattcaggaacttgaaaaccttcccgggtccctggccggggatttgcgaaccaaagcgaccattgagctcaaggccctcaggctgctgaacttccagaggcagctgcgccaggaggtggtggtgtgcatgcggagggacacagcgctggagacagccctcaatgctaaggcctacaagcgcagcaagcgccagtccctgcgcgaggcccgcatcactgagaagctggagaagcagcagaagatcgagcaggagcgcaagcgccggcagaagcaccaggaatacctcaatagcattctccagcatgccaaggatttcaaggaatatcacagatccgtcacaggcaaaatccagaagctgaccaaggcagtggccacgtaccatgccaacacggagcgggagcagaagaaagagaacgagcggatcgagaaggagcgcatgcggaggctcatggctgaagatgaggaggggtaccgcaagctcatcgaccagaagaaggacaagcgcctggcctacctcttgcagcagacagacgagtacgtggctaacctcacggagctggtgcggcagcacaaggctgcccaggtcgccaaggagaaaaagaagaaaaagaaaaagaagaaggcagaaaatgcagaaggacagacgcctgccattgggccggatggcgagcctctggacgagaccagccagatgagcgacctcccggtgaaggtgatccacgtggagagtgggaagatcctcacaggcacagatgcccccaaagccgggcagctggaggcctggctcgagatgaacccggggtatgaagtagctccgaggtctgatagtgaagaaagtggctcagaagaagaggaagaggaggaggaggaagagcagccgcaggcagcacagcctcccaccctgcccgtggaggagaagaagaagattccagatccagacagcgatgacgtctctgaggtggacgcgcggcacatcattgagaatgccaagcaagatgtcgatgatgaatatggcgtgtcccaggcccttgcacgtggcctgcagtcctactatgccgtggcccatgctgtcactgagagagtggacaagcagtcagcgcttatggtcaatggtgtcctcaaacagtaccagatcaaaggtttggagtggctggtgtccctgtacaacaacaacctgaacggcatcctggccgacgagatgggcctggggaagaccatccagaccatcgcgctcatcacgtacctcatggagcacaaacgcatcaatgggcccttcctcatcatcgtgcctctctcaacgctgtccaactgggcgtacgagtttgacaagtgggccccctccgtggtgaaggtgtcttacaagggatccccagcagcaagacgggcctttgtcccccagctccggagtgggaagttcaacgtcttgctgacgacgtacgagtacatcatcaaagacaagcacatcctcgccaagatccgttggaagtacatgattgtggacgaaggtcaccgcatgaagaaccaccactgcaagctgacgcaggtgctcaacacgcactatgtggcaccccgccgcctgctgctgacgggcacaccgctgcagaacaagcttcccgagctctgggcgctgctcaacttcctgctgcccaccatcttcaagagctgcagcaccttcgagcagtggtttaacgcaccctttgccatgaccggggaaaaggtggacctgaatgaggaggaaaccattctcatcatccggcgtctccacaaagtgctgcggcccttcttgctccgacgactcaagaaggaagtcgaggcccagttgcccgaaaaggtggagtacgtcatcaagtgcgacatgtctgcgctgcagcgagtgctctaccgccacatgcaggccaagggcgtgctgctgactgatggctccgagaaggacaagaagggcaaaggcggcaccaagaccctgatgaacaccatcatgcagctgcggaagatctgcaaccacccctacatgttccagcacatcgaggagtccttttccgagcacttggggttcactggcggcattgtccaagggctggacctgtaccgagcctcgggtaaatttgagcttcttgatagaattcttcccaaactccgagcaaccaaccacaaagtgctgctgttctgccaaatgacctccctcatgaccatcatggaagattactttgcgtatcgcggctttaaatacctcaggcttgatggaaccacgaaggcggaggaccggggcatgctgctgaaaaccttcaacgagcccggctctgagtacttcatcttcctgctcagcacccgggctggggggctcggcctgaacctccagtcggcagacactgtgatcatttttgacagcgactggaatcctcaccaggacctgcaagcgcaggaccgagcccaccgcatcgggcagcagaacgaggtgcgtgtgctccgcctctgcaccgtcaacagcgtggaggagaagatcctagctgcagccaagtacaagctcaacgtggaccagaaggtgatccaggccggcatgttcgaccagaagtcctccagccatgagcggcgcgccttcctgcaggccatcctggagcacgaggagcaggatgagagcagacactgcagcacgggcagcggcagtgccagcttcgcccacactgcccctccgccagcgggcgtcaaccccgacttggaggagccacctctaaaggaggaagacgaggtgcccgacgacgagaccgtcaaccagatgatcgcccggcacgaggaggagtttgatctgttcatgcgcatggacctggaccgcaggcgcgaggaggcccgcaaccccaagcggaagccgcgcctcatggaggaggacgagctcccctcgtggatcatcaaggacgacgcggaggtggagcggctgacctgtgaggaggaggaggagaagatgttcggccgtggctcccgccaccgcaaggaggtggactacagcgactcactgacggagaagcagtggctcaaggccatcgaggagggcacgctggaggagatcgaagaggaggtccggcagaagaaatcatcacggaagcgcaagcgagacagcgacgccggctcctccaccccgaccaccagcacccgcagccgcgacaaggacgacgagagcaagaagcagaagaagcgcgggcggccgcctgccgagaaactctcccctaacccacccaacctcaccaagaagatgaagaagattgtggatgccgtgatcaagtacaaggacagcagcagtggacgtcagctcagcgaggtcttcatccagctgccctcgcgaaaggagctgcccgagtactacgagctcatccgcaagcccgtggacttcaagaagataaaggagcgcattcgcaaccacaagtaccgcagcctcaacgacctagagaaggacgtcatgctcctgtgccagaacgcacagaccttcaacctggagggctccctgatctatgaagactccatcgtcttgcagtcggtcttcaccagcgtgcggcagaaaatcgagaaggaggatgacagtgaaggcgaggagagtgaggaggaggaagagggcgaggaggaaggctccgaatccgaatctcggtccgtcaaagtgaagatcaagcttggccggaaggagaaggcacaggaccggctgaagggcggccggcggcggccgagccgagggtcccgagccaagccggtcgtgagtgacgatgacagtgaggaggaacaagaggaggaccgctcaggaagtggcagcgaagaagactgagccccgacattccagtctcgaccccgagcccctcgttccagagctgagatggcataggccttagcagtaacgggtagcagcagatgtagtttcagacttggagtaaaactgtataaacaaaagaatcttccatatttatacagcagagaagctgtaggactgtttgtgactggccctgtcctggcatcagtagcatctgtaacagcattaactgtcttaaagagagagagagagaattccgaattggggaacacacgatacctgtttttcttttccgttgctggcagtactgttgcgccgcagtttggagtcactgtagttaagtgtggatgcatgtgcgtcaccgtccactcctcctactgtattttattggacaggtcagactcgccgggggcccggcgagggtatgtcagtgtcactggatgtcaaacagtaataaattaaaccaacaacaaaacgcacagccaaaaaaaaa

SEQ ID NO: 145 - DNA, 10914 bp, Homo sapiens
cgccccccctgcgcccgcccctcccccttcgctttccttctccccccgcctcggctccgacatgaggggccggcggggcaggccgcccaagcagcccgcggctcccgctgcggagcgctgcgccccggccccgccgccaccgccgccgccgcccacgtccggacccatcggggggctccgctcgcggcaccgcggcagcagccggggcaggtgggccgccgcccaggctgaggtggcgcccaagacgcggctgagctcgcccagggggggcagcagtagccggaggaagccgccgccgccgccgccggccccccccagcaccagcgccccgggccggggggggcgaggaggcgggggcggcaggacggggggcgggggcggcggcggccacctggcccggaccaccgcggcccggagggccgtcaacaaagtggtgtacgatgaccacgagagcgaggaggaggaggaagaggaggacatggtctccgaggaggaggaggaggaggacggcgacgccgaggagacccaggattctgaggacgacgaggaggatgagatggaagaggacgacgatgactccgattatccggaggagatggaagacgacgacgacgacgccagttactgcacggaaagcagcttcaggagccatagtacctacagcagcactccaggtaggcgaaaaccaagagtacatcggcctcgttctcctatattggaagaaaaagacatcccgccccttgaatttcccaagtcctctgaggatttaatggtgcctaatgagcatataatgaatgtcattgccatttacgaggtactgcggaactttggcactgttttgagattatctccttttcgctttgaggacttttgtgcagctctggtgagccaagagcagtgcacactcatggcagagatgcatgttgtgcttttgaaagcagttctgcgtgaagaagacacttccaatactacctttggacctgctgatctgaaagatagcgttaattccacactgtatttcatagatgggatgacgtggccagaggtgctgcgggtgtactgtgagagtgataaggagtaccatcacgttcttccttaccaagaggcagaggactacccatatggaccagtagagaacaagatcaaagttctacagtttctagtcgatcagtttcttacaacaaatattgctcgagaggaattgatgtctgaaggggtgatacagtatgatgaccattgtagggtttgtcacaaacttggggatttgctttgctgtgagacatgttcagcagtataccatttggaatgtgtgaagccacctcttgaggaggtgccagaggacgagtggcagtgtgaagtctgtgtagcacacaaggtgcctggtgtgactgactgtgttgctgaaatccaaaaaaataaaccatatattcgacatgaacctattggatatgatagaagtcggaggaaatactggttcttgaaccgaagactcataatagaagaagatacagaaaatgaaaatgaaaagaaaatttggtattacagcacaaaggtccaacttgcagaattaattgactgtctagacaaagattattgggaagcagaactctgcaaaattctagaagaaatgcgtgaagaaatccaccgacacatggacataactgaagacctgaccaataaggctcggggcagtaacaaatcctttctggcggcagctaatgaagaaattttggaatccataagagccaaaaagggagacattgataatgttaaaagcccagaagaaacagaaaaagacaagaatgagactgagaatgactctaaagatgctgagaaaaacagagaagaatttgaagaccagtcccttgaaaaagacagtgacgacaaaacaccagatgatgaccctgagcaaggaaaatctgaggtaggtgatttcaaatcggagaagtccaacggggagctaagtgaatctcctggagctggaaaaggagcatctggctcaactcgaatcatcaccagattgcggaatccagatagcaaacttagtcagctgaagagccagcaggtggcagccgctgcacatgaagcaaataaattatttaaggagggcaaagaggtactggtagttaactctcaaggagaaatttcacggttgagcaccaaaaaggaagtgatcatgaaaggaaatatcaacaattattttaaattgggtcaagaagggaagtatcgcgtctaccacaatcaatactccaccaattcatttgctttgaataagcaccagcacagagaagaccatgataagagaaggcatcttgcacataagttctgtctgactccagcaggagagttcaaatggaacggttctgtccatgggtccaaagttcttaccatatctactctgagactgactatcacccaattagaaaacaacatcccttcatcctttcttcatcccaactgggcatcacatagggcaaattggatcaaggcagttcagatgtgtagcaaacccagagaatttgcattggctttagccattttggagtgtgcagttaaaccagttgtgatgctaccaatatggcgagaatctttaggacataccaggttacaccggatgacatcaattgaaagagaagaaaaggagaaagtcaaaaaaaaagagaagaaacaggaagaagaagaaacgatgcagcaagcgacatgggtaaaatacacatttccagttaagcatcaggtttggaaacaaaaaggtgaagagtacagagtgacaggatatggtggttggagctggattagtaaaactcatgtttataggtttgttcctaaattgccaggcaatactaatgtgaattacagaaagtcgttagaaggaaccaaaaataatatggatgaaaatatggatgagtcagataaaagaaaatgttcacgaagtccaaaaaaaataaaaatagagcctgattctgaaaaagatgaggtaaaaggttcagatgctgcaaaaggagcagaccaaaatgaaatggatatctcaaagattactgagaagaaggaccaagatgtgaaggagctcttagattctgacagtgataaaccctgcaaggaagaaccaatggaagtagacgatgacatgaaaacagagtcacatgtaaattgtcaggagagttctcaagtagatgtggtcaatgttagtgagggttttcatctaaggactagttacaaaaagaaaacaaaatcatccaaactagatggacttcttgaaaggagaattaaacagtttacactggaagaaaaacagcgactcgaaaaaatcaagttggagggtggaattaagggtataggaaagacttctacaaattcttcaaaaaatctctctgaatcaccagtaataacgaaagcaaaagaagggtgtcagagtgactcgatgagacaagaacagagcccaaatgcaaataatgatcaacctgaggacttgattcagggatgttcagaaagtgattcctcagttcttagaatgagtgatcctagtcataccacaaacaaactttatccaaaagatcgagtgttagatgatgtctccattcggagcccagaaacaaaatgtccgaaacaaaattccattgaaaatgacatagaagaaaaagtctctgaccttgccagtagaggccaggaacccagtaagagtaaaacaaaaggaaatgattttttcatcgatgactctaaactagccagtgcagatgatattggtactttgatctgtaagaacaaaaaaccgctcatacaggaggaaagtgacaccattgtttcttcttccaagagtgctttacattcatcagtgcctaaaagtaccaatgacagagatgccacacctctgtcaagagcaatggactttgaaggaaaactgggatgtgactctgaatctaatagcactttggaaaatagttctgataccgtgtctattcaggatagcagtgaagaagatatgattgttcagaatagcaatgaaagcatttctgaacagttcagaactcgagaacaagatgttgaagtcttggagccgttaaagtgtgagttggtttctggtgagtccactggaaactgtgaggacaggctgccggtcaaggggactgaagcaaatggtaaaaaaccaagtcagcagaagaaattagaggagagaccagttaataaatgtagtgatcaaataaagctaaaaaataccactgacaaaaagaataatgaaaatcgagagtctgaaaagaaaggacagagaacaagtacatttcaaataaatggaaaagataataaacccaaaatatatttgaaaggtgaatgcttgaaagaaatttctgagagtagagtagtaagtggtaatgttgaaccaaaggttaataatataaataaaataatccctgagaatgatattaaatcattgactgttaaagaatctgctataaggccattcattaatggtgatgtcatcatggaagattttaatgaaagaaacagctccgaaacaaaatcgcatttgctgagttcttcagatgctgaaggtaactaccgagatagccttgagaccctgccatcaaccaaagagtctgacagtacacagacgaccacaccctcagcatcttgtccagaaagcaattcagttaatcaggtagaagatatggaaatagaaacctcagaagttaagaaagttacttcatcacctattacttctgaagaggaatctaatctcagtaatgactttattgatgaaaatggtctgcccatcaacaaaaatgaaaatgtcaatggagaatctaaaagaaaaaccgtcatcacagaagtcaccacgatgacctccacagtggccacagaatcaaaaactgtgatcaaggtagaaaaaggcgataagcaaactgtggtttcttccacagaaaattgtgcaaaatccactgtcacaaccaccactacaacagtgaccaagctttccacaccctccacaggcggcagtgtggacatcatctctgtaaaggagcagagcaaaaccgtggtcaccacgacagtgacagactccctgaccaccacgggaggcacactggttacatctatgactgtgagcaaagagtattccacacgagacaaagtgaaactgatgaaattttcaagaccaaagaagactcgttcaggtacagctctgccatcctatagaaaatttgttaccaagagcagcaagaagagcatttttgttttgcctaatgatgacttaaaaaagttggcccgaaaaggaggaatccgagaggtcccttattttaattacaatgcaaaacctgctttggatatatggccatatccttctcctagaccgacctttggcatcacttggaggtatagacttcagacagtaaagtccttagctggagtgagcctgatgttacggttactgtgggcaagtttgagatgggatgatatggcggccaaggctcctccaggaggagggactacacggacagaaacatccgaaactgaaatcacaacaacagaaataattaagaggagagatgttggtccttatggcattcgatctgaatattgtatcaggaaaatcatttgtcccattggagttccagaaacaccaaaagaaacgcctacacctcagaggaaaggccttcgatcaagtgcactgcggccaaagagaccagaaacgcccaagcaaactggccctgttattattgaaacctgggtagcagaagaagaactggaattgtgggagatcagggcatttgctgagagagtggagaaagaaaaggcacaagcagttgagcaacaggctaagaaacgactggagcagcagaagccgacagtgattgcaacttccactacttccccaacaagcagtacaaccagcaccatctctccagcacagaaggttatggtggcccccataagtggctcagttacaactggaaccaaaatggtactaactactaaagttggatctccagctacagtaacattccaacaaaacaagaactttcatcaaacctttgctacatgggttaagcaaggccagtcaaattcaggcgttgttcaagtacagcagaaagtcctgggtatcattccatcaagtacaggtaccagtcagcaaacctttacttcattccagcccaggacagcaacagtcacaattaggcccaatacctcaggctctggaggaaccacaagcaattcacaagtaatcacagggcctcagattcgccctggtatgaccgtgattagaacaccactccaacagtcaacactaggaaaggcaattattcgaacacctgtgatggtacagccaggtgctcctcagcaagtgatgactcaaatcatcagggggcagcctgtctccactgcagtctccgcccctaacacggtttcctcaacacctgggcagaaaagcttaacttcagcaacgtccacttcaaatatacagtcttcagcctcacaaccccctcgcccccaacaaggacaagtgaagctcaccatggctcaacttactcagttaacacagggccacggtggcaatcaaggtttgacagtagtaattcaaggacaaggtcaaactactggacagttgcagttgatacctcaaggggtgactgtactcccaggcccaggccagcagctaatgcaagctgcaatgccaaatggtactgttcagcgattcctctttaccccattggcaacaacagccaccacagccagcaccaccaccaccactgtttccacgacagcagcaggtacaggtgaacaaaggcagagtaaactgtcaccccagatgcaggtacatcaagacaaaaccctgccaccagctcagtcatcaagtgtgggtccagcagaagcccagccacagactgctcagccttcagctcagccccagccccaaacccagccccagtccccagctcagcctgaagttcagactcagcctgaagttcagacccaaacaactgtttcatcccatgtcccttctgaagcacaacccacccacgcacagtcatccaagccccaagttgcagcacagtctcagcctcaaagtaatgtccaaggacagtctcctgttcgtgtccaaagtccatcacagactcgaatacgtccatcaactccatcccaactgtctcctggacaacaatcccaggttcagactacaacctcacaaccgattccaattcaaccacatacatctcttcagataccttcccaaggccagccacagtcacaaccccaggtacagtcttcaactcaaactctttcatcaggacaaactttaaatcaagttactgtttcatccccatcccgtcctcagctacaaatacagcagccacagccccaagtcattgctgtgcctcagctgcaacaacaagtccaggttctctctcagatccagtcacaggttgtggctcagatacaggctcagcaaagtggtgtgccccagcaaatcaaactccagttacctatccaaattcagcaaagcagtgctgtgcagactcaccagattcagaatgtggttacagtgcaggcagccagtgtgcaagagcagttgcaaagggttcagcaactcagggatcagcagcaaaagaagaaacagcaacagatagaaattaagcgtgaacacaccctccaagcttctaatcaaagtgaaatcattcagaaacaggtggtgatgaagcataatgctgtaatagaacatttaaaacagaaaaagagcatgactccagctgaaagagaagagaatcaaagaatgattgtctgtaaccaggtgatgaagtatattttggataagatagataaagaagaaaaacaggcagcaaaaaaacggaagcgtgaagagagtgtggagcagaaacgtagcaagcagaatgccactaagctgtcagctctgctcttcaagcacaaagagcagctcagagccgagatcctgaagaagagagcactcctggacaaggatctgcaaattgaagtgcaggaagagctgaagagagacctgaaaattaagaaagaaaaagacctgatgcagttggctcaggccacagcagtagctgcaccctgccccccagtgacaccagctcctccagcccctccagcccctccaccttcacctccccctccacctgctgtgcaacacacaggccttctgtccacgcccaccttacctgctgcttcccagaagaggaagcgggaagaggaaaaagactccagctcaaagtccaagaaaaagaaaatgatctctactacctcaaaggaaactaagaaggacacaaagctttactgtatctgtaaaacgccttatgatgaatctaaattttatattggctgtgatcggtgtcagaattggtaccatgggcgctgcgttggcatcttgcaaagtgaggcagagctcattgatgagtatgtctgtccacagtgccagtcaacagaggatgccatgacagtgctcacgccactaacagagaaggattatgaggggttgaagagggtgctccgttccttacaggcccataagatggcctggcctttccttgaaccagtagaccctaatgatgcaccagattattatggtgttattaaggaacctatggaccttgccaccatggaagaaagagtacaaagacgatattatgaaaagctgacggaatttgtggcagatatgaccaaaatttttgataactgtcgttactacaatccaagtgactccccattttaccagtgtgcagaagttctcgaatcattctttgtacagaaattgaaaggcttcaaagctagcaggtctcataacaacaaactgcagtctacagcttcttaaagttcagcgtgttaacctaacataaaacacagcaagaatctggttgtctgaactattttaaattaaggagccagatgtttttagtcaggctatcctgacaagacttgacctaaacttcgtttttattggtcataacagtccaattatattcttggccaattttgtccaacggacaagaaaaaagcaaagtcaacgacaccattatcttgtcaagatcagatggttttactattgtggcagaagcgagaaaactttgtttattgaaaaaaaaagaaaaagaaagcaagaaaaaaagatactatggggtcaagtgtaactccatggaaatgccacgtctgctcttcagtgaagaagctggtttagagtctcacagaaaacttttgactgtatttatttattgttgcaaaaaagacgcttttttattgctgccctcatttgtcagctaattattttttcttataaaatccagccccggttacatataatcatctgtatcttatcatgattcctgtaggtaaaagtacaagacgacctctagatgtcttttctttctatgaaaggagctgctatgtacacatgtgcacacacacacaactgggaatcaacaatgagtttattgttcatggtagattaaaattaagcttgcataaaggttgggctaagtggtcctggactacagactctgttgccttgaatataacagtacaatttgtcaattactctgcaccaggctaaaatgagtaaaatctatttgaaggtatcttgtttgtaaacatttgtcagattctaatttttttcttttgtattaaaattcaactatggatgtatatgaaacaaaataaatggagataatttttctcccacagacagaggtgtctttgaatgtgcgctaatgattatctgtaagcctttgtggggagggaggcctgcaaggtcatgaaaggcagaagagtctaattgtgcctggatttctccaggacagcagtggcccctcgttttatcattcccagtccattgtcatcacgtcagagaaaaatcttcaggggtgctaatcctgttgcatcagttgatcatactaacgagaacggtaatgcgacaagatacacattgccttcatctgtacattctgtgataccaggcaaattaccaattacacacagctacttatattttatgaagggcattttttagatgacctcatcctctgtgttatttgttgattgggtttgttttctgtttgttggtttgtttgtttcttccacgtaaggaaaagtagtgtaaacagtagcgagaaaatggaaaccacagaggaagatgtattttgcatgtttttcctttcagtgttcttacacgttgtatcactgcattgtggtaatagcttctataaaatctgccatagttggattatgcagctttgcaaaaatttttactagattttgcactaactcatattagctttgtcctaccaacttctggaatttatctaattattgtttttcaaagtttctttccttttaatgtttccctgctatgcaaaacctttcccagacctcagtttcttaaaagaaagatgttgctacagttcccgattctttcttattacaggctcaggtgtacaggttattctgggttaattttatctaatgaagcccattcctttttgtacataaagatgtcacttaaacttatgcttacaaactaaagactaatcgctcaatatgaaaacatgaaaaaatttttgcttaaagtattaagatggaagtagttaaatatgggttattttgtccttttacttttttaaaaaatgttacatattgtatgcactgtgctgatgcaagaattctacattttaatgagttataaaattattctgcatctcatcacgtcacagtatttctgtactatttattcatatatataaatatatatgggcttaatcatttaaaatttgttgcagcaagaactttcctacctgtaggcaatagattgctatgtttttaacaaattgtggcaaattctaaacagcaattcttttgtacgtaataggacatttcatcctagaaaaataaagtaatgtttttgacattgga

SEQ ID NO: 146 - DNA, 4025 bp, Homo sapiens
ggcctgagcgaaggggttggaagcggagtgattccccacccctgctccatctagctctttccagtgcagccactgccgccgcccaggagccctcgtcccctgccttgtccccctactcgttcccgctcccacggcatggagcaggacactgccgcagtggcagccaccgtggcagccgcggatgcgaccgccactatcgtggtcatagaggacgagcagcccgggccgtccacctctcaggaggagggagcggccgccgcggccaccgaagccaccgcggccacggagaagggcgagaagaagaaggagaaaaacgtttcttcatttcaactcaaacttgctgctaaagcgcctaaatctgaaaaggaaatggacccagaatatgaagagaaaatgaaagccgaccgagcaaagagatttgaatttttactgaagcagacagaactttttgcacatttcattcagccttcagcacagaaatctccaacatctccactgaacatgaaattgggacgtccccgaataaagaaagatgaaaagcagagcttaatttctgctggagactaccgccataggcgcacagagcaagaagaagatgaagagctactgtctgagagtcggaaaacatctaatgtgtgtattagatttgaggtgtcaccttcatatgtgaaaggggggccactgagagattatcagattcgaggactgaattggttgatctctttatatgaaaatggagtcaatggcattttggctgatgaaatgggccttgggaaaactttacaaacaattgctttgcttggttacctgaaacactaccgaaatattcctggacctcacatggttttagttccaaagtctactttacacaactggatgaatgaatttaaacgatgggtcccatctctccgtgtcatttgttttgtcggagacaaggatgccagagctgcttttattcgtgatgaaatgatgccaggagagtgggatgtttgcgttacttcttatgagatggtaattaaagaaaaatctgtattcaaaaagtttcactggcgatacctggtcattgatgaagctcacagaataaagaatgaaaaatctaagctttcagagattgttcgtgagttcaagtcgactaaccgcttgctcctaactggaacacctttgcagaataacctgcatgaactgtgggccttactcaactttttattgcctgatgtctttaattctgcagatgactttgattcttggtttgacactaaaaattgtcttggtgatcaaaaactcgtggaaagacttcatgcagttttaaaaccatttttgttacgccgtataaaaactgatgtagagaagagtctgccacctaaaaaggaaataaagatttacttggggctgagtaagatgcaacgagaatggtatacaaaaatcctgatgaaagatattgatgttttaaactcttctggcaagatggacaagatgcgactcttaaacattctgatgcagcttcgaaagtgttgtaatcatccatatctgtttgatggtgctgaacctggtccaccttataccactgatgagcatattgtcagcaacagtggtaaaatggtagttctggataaactattggccaaactcaaagaacagggttcaagggttctcattttcagccagatgactcgcttgctggatattttggaagattattgcatgtggcgtggttatgagtattgtcgactggatggacaaaccccgcatgaagaaagagaggataaattcctagaagtggaatttctgggtcaaagggaagcaatagaggcttttaatgctcctaatagtagcaaattcatctttatgctaagtaccagggctggaggtctcggaattaacctggcaagtgctgatgtggttatactatatgattcagactggaacccacaggttgatctacaagctatggatcgagcacatcgtattggtcagaagaaaccagtacgtgtattccgtctcatcactgacaacactgttgaagagaggattgtagaaagagctgagataaaactgagactcgattcaattgttatacaacaaggaagactcattgaccaacagtctaacaagctggcaaaagaggaaatgttacaaatgatacggcatggagccacccatgtttttgcttctaaagagagtgagttgacagatgaagacattacaactattctggaaagaggggaaaagaagactgcagagatgaatgaacgcctgcaaaaaatgggagagtcttctctaagaaattttagaatggacattgaacaaagtttatacaaatttgagggagaagattatagagaaaaacagaagcttggcatggtggaatggattgaacctcctaaacgagaacgcaaagcaaactacgcagtggatgcctactttagagaggctttgcgtgtcagcgagccaaagattccaaaggctccacggcctccaaaacagccaaatgttcaggattttcaatttttcccaccacgcttatttgagctcctggaaaaggaaattctttattatcggaagacaataggctataaggttccaaggaatcctgatatcccaaatccagctctggctcaaagagaagagcaaaaaaagattgatggagctgaacctcttacaccagaagagactgaagaaaaggaaaaacttctcacacaaggtttcacaaactggactaaacgagattttaaccagtttattaaagctaatgagaaatatggaagagatgacattgataacatagctcgagaggtagagggcaaatcccctgaggaggtcatggagtattcagctgtattttgggaacgttgcaatgaattacaggacattgagaaaattatggctcaaattgaacgtggagaagcaagaattcaacgaaggatcagtatcaagaaagccctggatgccaaaattgcaagatacaaggctccatttcatcagttgcgcattcagtatggaaccagcaaaggaaagaactatactgaggaagaagatagattcttgatttgtatgttacacaaaatgggctttgatagagaaaatgtatatgaagaattaagacagtgtgtacgaaatgctccccagtttagatttgactggtttatcaagtctaggactgccatggaattccagagacgctgtaacactctgatttcattgattgagaaagaaaatatggaaattgaggaaagagagagagcagaaaagaagaaacgggcaactaaaactccaatgtcacagaaaagaaaagcagagtcagctactgagagctctggaaagaaggatgtcaagaaggtgaaatcctaaagcctagaaataaagttttaaatgggaaactgctattttcttgttcccatcttcaaatgctaattgccagttccagtgtattcatggtactctaagaaaaatctctttggttttgatttcttgcatattttatatattttacaatgctttctacctgaaatgtgtagctttatattttatggcattctagtatttttgtgtactgtattttgtgcatttcatgtcttcatcaaaatcctctcagtccttgttcttttgaagcttgtgctgaggttttagcttttctatgttttatatgccgctgctttgaaagagaacctagattctatagttgtattattgttgtttcatactttaaatttatatggctgtggaaaaacgaattaaaatgttttgaggagaaagactttttcacttctttgttgctttcttttctattgagtctgggcttgtttgtgttactgcatactgtgattagcataataattgtttctttgaggtcatctaaatatttttttcctaaaggaataaagggtgaggaaagaaaaatattaaaaaagctaatatttgatactgtgcttgctgtcagtatgcattacatttaaattattctctattcaagtgggaaaatataataaagaaatgtctataagaaatttaaaaaaaaaaaaaaaaaa

SEQ ID NO: 147 - DNA, 67 bp, Artificial Sequence
  A synthetic sequence
cacggggtgcggctacgtcgcacaaaaataaagttggttattctgggtcttgagcgattgtgtaggc

SEQ ID NO: 148 - DNA, 72 bp, Artificial Sequence
  A synthetic sequence
atcctgagtcaaacgggtgatcgtctgatgatcgtcaaaccggaaaaattagccatggtccatatgaatatc

SEQ ID NO: 149 - DNA, 67 bp, Artificial Sequence
  A synthetic sequence
aaaatgttggttttatcggctggcgcggaatggtcggctctgttctgtcttgagcgattgtgtaggc

SEQ ID NO: 150 - DNA, 72 bp, Artificial Sequence
  A synthetic sequence
gccaactggcgcagcattcgacgcagcggctcggcggcgccccataaattagccatggtccatatgaatatc

SEQ ID NO: 151 - DNA, 67 bp, Artificial Sequence
  A synthetic sequence
cattgagtgttggacagggttatttcacatcatctatcagttctgagtcttgagcgattgtgtaggc

SEQ ID NO: 152 - DNA, 72 bp, Artificial Sequence
  A synthetic sequence
tcagtggaataatgatgagctataaaactttctaacattatggcaaaattagccatggtccatatgaatatc

SEQ ID NO: 153 - DNA, 67 bp, Artificial Sequence
  A synthetic sequence
cgattactatagggaatggttttttaaaaagtgaaatccttaccaagtcttgagcgattgtgtaggc

SEQ ID NO: 154 - DNA, 72 bp, Artificial Sequence
  A synthetic sequence
aaaaaacaacataaacagccgctttgttgttctgagcgaacgtgtaaattagccatggtccatatgaatatc

SEQ ID NO: 155 - DNA, 33 bp, Artificial Sequence
  A synthetic sequence
aaaaaaacatgtgtggaattgtgagcggataac

SEQ ID NO: 156 - DNA, 36 bp, Artificial Sequence
  A synthetic sequence
aaaaaagacgtcttatttgtatagttcatccatgcc

SEQ ID NO: 157 - DNA, 33 bp, Artificial Sequence
  A synthetic sequence
aaaaaaacatgtcacataaaacactagcacttt

SEQ ID NO: 158 - DNA, 33 bp, Artificial Sequence
  A synthetic sequence
aaaaaatctagacctccttactttattaaacac

SEQ ID NO: 159 - DNA, 33 bp, Artificial Sequence
  A synthetic sequence
aaaaaaacatgttataagcgattaattgcgcaa

SEQ ID NO: 160 - DNA, 33 bp, Artificial Sequence
  A synthetic sequence
aaaaaatctagataatctcacttatactggagt

SEQ ID NO: 161 - DNA, 36 bp, Artificial Sequence
  A synthetic sequence
aaaaaaccatggtttaagaaggagatatacatatgg

SEQ ID NO: 162 - DNA, 33 bp, Artificial Sequence
  A synthetic sequence
aaaaaaggtacctcactccttccgcacgtaatt

SEQ ID NO: 163 - DNA, 36 bp, Artificial Sequence
  A synthetic sequence
aaaaaatctagatttaagaaggagatatacatatgg

SEQ ID NO: 164 - DNA, 33 bp, Artificial Sequence
  A synthetic sequence
aaaaaagacgtctcactccttccgcacgtaatt

SEQ ID NO: 165 - DNA, 32 bp, Artificial Sequence
  A synthetic sequence
aaaaaagagctcgactggaaagcgggcagtga

SEQ ID NO: 166 - DNA, 33 bp, Artificial Sequence
  A synthetic sequence
aaaaaagagctcaagcttgcatgcctgcaggag

SEQ ID NO: 167 - DNA, 39 bp, Artificial Sequence
  A synthetic sequence
tttaagaaggagatatacatatgggtggagaggatgatg

SEQ ID NO: 168 - DNA, 71 bp, Artificial Sequence
  A synthetic sequence
cttgcatgcctgcaggagatttacagatcctcttctgagatgagtttttgttcgttccgaaagcgaccaac

SEQ ID NO: 169 - DNA, 30 bp, Artificial Sequence
  A synthetic sequence
atgtatatctccttcttaaatctagaggtc

SEQ ID NO: 170 - DNA, 51 bp, Artificial Sequence
  A synthetic sequence
gaacaaaaactcatctcagaagaggatctgtaaatctcctgcaggcatgca

SEQ ID NO: 171 - DNA, 36 bp, Artificial Sequence
  A synthetic sequence
aaaaaagagctcgttagcaatttaactgtgataaac

SEQ ID NO: 172 - DNA, 100 bp, Artificial Sequence
  A synthetic sequence
tcaatctcctgcaggcatgctttacactttatgcttccggctcgtataataaaaaaaaaaaaggaggaaaaaaaatggaagatgccaaaaacattaagaa

SEQ ID NO: 173 - DNA, 42 bp, Artificial Sequence
  A synthetic sequence
ggggcgtaatttgatatcaagctttacacggcgatcttgccg

SEQ ID NO: 174 - DNA, 23 bp, Artificial Sequence
  A synthetic sequence
agcttgatatcaaattacgcccc

SEQ ID NO: 175 - DNA, 20 bp, Artificial Sequence
  A synthetic sequence
gcatgcctgcaggagattga

SEQ ID NO: 176 - DNA, 60 bp, Artificial Sequence
  A synthetic sequence
aaaaaaccatgggttaataaaaggaggaatatatatgcatacatccgagttgctaaaaca

SEQ ID NO: 177 - DNA, 43 bp, Artificial Sequence
  A synthetic sequence
aaaaaactcgagaaaaattaaacagcctgttcgatctgttcat

SEQ ID NO: 178 - DNA, 100 bp, Artificial Sequence
  A synthetic sequence
ccgcatagttaagccagtatacatttacactttatgcttccggctcgtataataaaaaaaaaaggaggaaaaaaaatgagtaaaggagaagaacttttca

SEQ ID NO: 179 - DNA, 75 bp, Artificial Sequence
  A synthetic sequence
tcacgtagcgatagcggagttacagatcctcttctgagatgagtttttgttctttgtatagttcatccatgccat

SEQ ID NO: 180 - DNA, 19 bp, Artificial Sequence
  A synthetic sequence
ctccgctatcgctacgtga

SEQ ID NO: 181 - DNA, 23 bp, Artificial Sequence
  A synthetic sequence
tgtatactggcttaactatgcgg

SEQ ID NO: 182 - DNA, 40 bp, Artificial Sequence
  A synthetic sequence
gcttgtctgctcccggcatcgtacgttttcgttccattgg

SEQ ID NO: 183 - DNA, 44 bp, Artificial Sequence
  A synthetic sequence
agacggtcacagcttgtctgtatctgcgtttactcctgtattac

SEQ ID NO: 184 - DNA, 21 bp, Artificial Sequence
  A synthetic sequence
acagacaagctgtgaccgtct

SEQ ID NO: 185 - DNA, 19 bp, Artificial Sequence
  A synthetic sequence
atgccgggagcagacaagc

SEQ ID NO: 186 - DNA, 43 bp, Artificial Sequence
  A synthetic sequence
cgcagcgagtcagtgagcacatgtcacataaaacactagcact

SEQ ID NO: 187 - DNA, 78 bp, Artificial Sequence
  A synthetic sequence
cgcacagatgcgtaaggagaattacagatcctcttctgagatgagtttttgttctttgtatagttcatccatgccatg

SEQ ID NO: 188 - DNA, 18 bp, Artificial Sequence
  A synthetic sequence
gctcactgactcgctgcg

SEQ ID NO: 189 - DNA, 21 bp, Artificial Sequence
  A synthetic sequence
ttctccttacgcatctgtgcg

SEQ ID NO: 190 - DNA, 46 bp, Artificial Sequence
  A synthetic sequence
atctgtgcggtatttcacaccacatgtcacataaaacactagcact

SEQ ID NO: 191 - DNA, 43 bp, Artificial Sequence
  A synthetic sequence
tactgagagtgcaccatatgctcactccttccgcacgtaattt

SEQ ID NO: 192 - DNA, 21 bp, Artificial Sequence
  A synthetic sequence
gcatatggtgcactctcagta

SEQ ID NO: 193 - DNA, 21 bp, Artificial Sequence
  A synthetic sequence
ggtgtgaaataccgcacagat

SEQ ID NO: 194 - DNA, 41 bp, Artificial Sequence
  A synthetic sequence
gggctaacaggaggaattaaccatggctcaggtgcagctgg

SEQ ID NO: 195 - DNA, 70 bp, Artificial Sequence
  A synthetic sequence
taccagctgcagatctcgagttacttgtcgtcatcgtctttgtagtccatgcttcttgaggagacggtga

SEQ ID NO: 196 - DNA, 20 bp, Artificial Sequence
  A synthetic sequence
ctcgagatctgcagctggta

SEQ ID NO: 197 - DNA, 22 bp, Artificial Sequence
  A synthetic sequence
ggttaattcctcctgttagccc

SEQ ID NO: 198 - DNA, 73 bp, Artificial Sequence
  A synthetic sequence
gggctaacaggaggaattaaccatggactacaaagacgatgacgacaagatggagaacactgaaaactcagtg

SEQ ID NO: 199 - DNA, 80 bp, Artificial Sequence
  A synthetic sequence
taccagctgcagatctcgagttacagatcctcttctgagatgagtttttgttcgtgataaaaatagagttcttttgtgag

SEQ ID NO: 200 - DNA, 918 bp, Artificial Sequence
  A synthetic sequence
atggactacaaagacgatgacgacaagatggagaacactgaaaactcagtggattcaaaatccattaaaaatttggaaccaaagatcatacatggaagcgaatcaatggactctggaatatccctggacaacagttataaaatggattatcctgagatgggtttatgtataataattaataataagaattttcataaaagcactggaatgacatctcggtctggtacagatgtcgatgcagcaaacctcagggaaacattcagaaacttgaaatatgaagtcaggaataaaaatgatcttacacgtgaagaaattgtggaattgatgcgtgatgtttctaaagaagatcacagcaaaaggagcagttttgtttgtgtgcttctgagccatggtgaagaaggaataatttttggaacaaatggacctgttgacctgaaaaaaataacaaactttttcagaggggatcgttgtagaagtctaactggaaaacccaaacttttcattattcaggcctgccgtggtacagaactggactgtggcattgagacagactaagtataagaaggagatatacatatgagtggtgttgatgatgacatggcgtgtcataaaataccagtggaggccgacttcttgtatgcatactccacagcacctggttattattcttggcgaaattcaaaggatggctcctggttcatccagtcgctttgtgccatgctgaaacagtatgccgacaagcttgaatttatgcacattcttacccgggttaaccgaaaggtggcaacagaatttgagtccttttcctttgacgctacttttcatgcaaagaaacagattccatgtattgtttccatgctcacaaaagaactctatttttatcacgaacaaaaactcatctcagaagaggatctgtaa

SEQ ID NO: 201 - DNA, 555 bp, Artificial Sequence
  A synthetic sequence
atggactacaaagacgatgacgacaagatggagaacactgaaaactcagtggattcaaaatccattaaaaatttggaaccaaagatcatacatggaagcgaatcaatggactctggaatatccctggacaacagttataaaatggattatcctgagatgggtttatgtataataattaataataagaattttcataaaagcactggaatgacatctcggtctggtacagatgtcgatgcagcaaacctcagggaaacattcagaaacttgaaatatgaagtcaggaataaaaatgatcttacacgtgaagaaattgtggaattgatgcgtgatgtttctaaagaagatcacagcaaaaggagcagttttgtttgtgtgcttctgagccatggtgaagaaggaataatttttggaacaaatggacctgttgacctgaaaaaaataacaaactttttcagaggggatcgttgtagaagtctaactggaaaacccaaacttttcattattcaggcctgccgtggtacagaactggactgtggcattgagacagactaa

SEQ ID NO: 202 - protein, 184 aa, Artificial Sequence
  A synthetic sequence
MDYKDDDDKMENTENSVDSKSIKNLEPKIIHGSESMDSGISLDNSYKMDYPEMGLCIIINNKNFHKSTGMTSRSGTDVDAANLRETFRNLKYEVRNKNDLTREEIVELMRDVSKEDHSKRSSFVCVLLSHGEEGIIFGTNGPVDLKKITNFFRGDRCRSLTGKPKLFIIQACRGTELDCGIETD

SEQ ID NO: 203 - DNA, 342 bp, Artificial Sequence
  A synthetic sequence
atgagtggtgttgatgatgacatggcgtgtcataaaataccagtggaggccgacttcttgtatgcatactccacagcacctggttattattcttggcgaaattcaaaggatggctcctggttcatccagtcgctttgtgccatgctgaaacagtatgccgacaagcttgaatttatgcacattcttacccgggttaaccgaaaggtggcaacagaatttgagtccttttcctttgacgctacttttcatgcaaagaaacagattccatgtattgtttccatgctcacaaaagaactctatttttatcacgaacaaaaactcatctcagaagaggatctgtaa

SEQ ID NO: 204 - protein, 113 aa, Artificial Sequence
  A synthetic sequence
MSGVDDDMACHKIPVEADFLYAYSTAPGYYSWRNSKDGSWFIQSLCAMLKQYADKLEFMHILTRVNRKVATEFESFSFDATFHAKKQIPCIVSMLTKELYFYHEQKLISEEDL

SEQ ID NO: 205 - DNA, 67 bp, Artificial Sequence; identical to SEQ ID NO: 147
  A synthetic sequence

SEQ ID NO: 206 - DNA, 72 bp, Artificial Sequence; identical to SEQ ID NO: 148
  A synthetic sequence

SEQ ID NO: 207 - DNA, 67 bp, Artificial Sequence; identical to SEQ ID NO: 149
  A synthetic sequence

SEQ ID NO: 208 - DNA, 72 bp, Artificial Sequence; identical to SEQ ID NO: 150
  A synthetic sequence

SEQ ID NO: 209 - DNA, 67 bp, Artificial Sequence
  A synthetic sequence
gtaatcttagcggtaccgataaaagcgtcattttgttgatgaccatgtcttgagcgattgtgtaggc

SEQ ID NO: 210 - DNA, 71 bp, Artificial Sequence
  A synthetic sequence
ttaaatcgagcgcctgcagagagtcctcccagtcggcccgttcaaaaattagccatggtccatatgaatat

SEQ ID NO: 211 - DNA, 67 bp, Artificial Sequence; identical to SEQ ID NO: 151
  A synthetic sequence

SEQ ID NO: 212 - DNA, 72 bp, Artificial Sequence; identical to SEQ ID NO: 152
  A synthetic sequence

SEQ ID NO: 213 - DNA, 67 bp, Artificial Sequence; identical to SEQ ID NO: 153
  A synthetic sequence

SEQ ID NO: 214 - DNA, 72 bp, Artificial Sequence; identical to SEQ ID NO: 154
  A synthetic sequence

SEQ ID NO: 215 - DNA, 60 bp, Artificial Sequence; identical to SEQ ID NO: 176
  A synthetic sequence

SEQ ID NO: 216 - DNA, 43 bp, Artificial Sequence; identical to SEQ ID NO: 177
  A synthetic sequence

SEQ ID NO: 217 - DNA, 100 bp, Artificial Sequence; identical to SEQ ID NO: 178
  A synthetic sequence

SEQ ID NO: 218 - DNA, 75 bp, Artificial Sequence; identical to SEQ ID NO: 179
  A synthetic sequence

SEQ ID NO: 219 - DNA, 19 bp, Artificial Sequence
  A synthetic sequence
ctccgctatcgctacgtga

SEQ ID NO: 220 - DNA, 23 bp, Artificial Sequence
  A synthetic sequence
tgtatactggcttaactatgcgg

SEQ ID NO: 221 - DNA, 40 bp, Artificial Sequence; identical to SEQ ID NO: 182
  A synthetic sequence

SEQ ID NO: 222 - DNA, 44 bp, Artificial Sequence; identical to SEQ ID NO: 183
  A synthetic sequence

SEQ ID NO: 223 - DNA, 21 bp, Artificial Sequence
  A synthetic sequence
acagacaagctgtgaccgtct

SEQ ID NO: 224 - DNA, 19 bp, Artificial Sequence
  A synthetic sequence
atgccgggagcagacaagc

SEQ ID NO: 225 - DNA, 43 bp, Artificial Sequence; identical to SEQ ID NO: 186
  A synthetic sequence

SEQ ID NO: 226 - DNA, 78 bp, Artificial Sequence; identical to SEQ ID NO: 187
  A synthetic sequence

SEQ ID NO: 227 - DNA, 18 bp, Artificial Sequence
  A synthetic sequence
gctcactgactcgctgcg

SEQ ID NO: 228 - DNA, 21 bp, Artificial Sequence
  A synthetic sequence
ttctccttacgcatctgtgcg

SEQ ID NO: 229 - DNA, 46 bp, Artificial Sequence; identical to SEQ ID NO: 190
  A synthetic sequence

SEQ ID NO: 230 - DNA, 43 bp, Artificial Sequence; identical to SEQ ID NO: 191
  A synthetic sequence

SEQ ID NO: 231 - DNA, 21 bp, Artificial Sequence
  A synthetic sequence
gcatatggtgcactctcagta

SEQ ID NO: 232 - DNA, 21 bp, Artificial Sequence
  A synthetic sequence
ggtgtgaaataccgcacagat
